(19) United States
(12) Patent Application Publication
(10) Pub. No.: US 2013/0123117 A1
(43) Pub. Date: May 16, 2013

(54) CAPTURE PROBE AND ASSAY FOR ANALYSIS OF FRAGMENTED NUCLEIC ACIDS

(71) Applicant: The Board of Trustees of the Leland Stanford Junio, Palo Alto, CA (US)

(72) Inventors: Hua Xu, Sunnyvale, CA (US); Georges Natsoulis, Kensington, CA (US); Hanlee P. Ji, Stanford, CA (US)

(73) Assignee: The Board of Trustees of the Leland Stanford Junior University, Palo Alto, CA (US)

(21) Appl. No.: 13/678,355

(22) Filed: Nov. 15, 2012

Related U.S. Application Data
(60) Provisional application No. 61/560,412, filed on Nov. 16, 2011.

(51) Int. Cl. C12Q 1/68

(52) U.S. Cl. CPC C12Q 1/6876
USPC 506/2; 506/16

(57) ABSTRACT

Disclosed is an efficient and scalable method for targeted resequencing and variant identification of nucleic acids such as genomic DNA found in single stranded, fragmented form, such as in a clinical sample of formalin-fixed, paraffin-embedded (FFPE) tissue. The method uses a large number of capture probes mixed with the sample in the presence of a 5′ to 3′ exonuclease, a 3′ to 5′ exonuclease, a ligase, and a universal amplification oligonucleotide that hybridizes to the various capture probes. The nucleases act on ssDNA, not dsDNA. A single stranded circle is formed by the ligase, and is then amplified to produce a population (library) of double stranded linear DNA molecules that are suitable for sequencing. It is shown that the library produces a high degree of fidelity to the original sample, and predictable base changes are shown.

### CROSS-REFERENCE TO RELATED APPLICATIONS

[0001] This application claims priority from U.S. Provisional Patent Application No. 61/560,412 filed on Nov. 16, 2011, which is hereby incorporated by reference in its entirety.

### STATEMENT OF GOVERNMENTAL SUPPORT

[0002] This invention was made with government support under contracts 2P01HG000205 and R21CA 140089-01A1 awarded by the National Institutes of Health. The government has certain rights in this invention.

### REFERENCE TO SEQUENCE LISTING, COMPUTER PROGRAM, OR COMPACT DISK

[0003] The instant application contains a Sequence Listing which has been submitted in ASCII format via EFS-Web and is hereby incorporated by reference in its entirety. Said ASCII copy, created on Oct. 26, 2012, is named 381596US.txt and is 828,319 bytes in size.

### BACKGROUND OF THE INVENTION

[0004] 1. Field of the Invention

[0005] The present invention relates to the field of nucleic analysis, and, more particularly, to methods for contacting fragmented nucleic acids, such as genomic DNA with probes and enzymes whereby selected portions of the genomic DNA are amplified and assayed.

[0006] 2. Related Art

[0007] Presented below is background information on certain aspects of the present invention as they may relate to technical features referred to in the detailed description, but not necessarily described in detail. That is, individual parts or methods used in the present invention may be described in greater detail in the materials discussed below, which materials may provide further guidance to those skilled in the art for making or using certain aspects of the present invention as claimed. The discussion below should not be construed as an admission as to the relevance of the information to any claims herein or the prior art effect of the material described.

[0008] Next generation DNA sequencing (NGS) has revolutionized genetics by enabling one to routinely sequence human genomes, either in their entirety or specific subsets. While NGS advances have dramatically increased our ability to identify disease-related genetic variants, the widespread application of NGS-based approaches to clinical populations faces some limitations. Citing an example, NGS-based discovery of cancer mutations for large translational and clinical studies is severely restricted by the availability of clinical samples from which one can extract high quality genomic DNA. The vast majority of cancers samples like gastric and colorectal cancer are processed with formalin fixed paraffin embedding (FFPE) of tissues. For clinical pathology laboratories, this is a preservation method because (1) it maintains morphological features of the tumor, (2) enables histopathologic examination with a number of staining processes and (3) can be stored indefinitely at room temperature. However, the fixation process causes irreversible damage to the sample genomic DNA via cross linkages and increased fragmentation. As a result, genomic DNA extracted from FFPE material is often of poor quality. Furthermore, FFPE-extracted genomic DNA is generally in a single stranded form because of the need for high temperature incubations to melt the paraffin. Therefore, the analysis of FFPE-derived genomic DNA using PCR-based assays is difficult. Overall, these issues restrict our ability to conduct clinical population genetic studies and genetic diagnostic development using these valuable samples.

[0009] A variety of methods have been developed to enrich specific regions of the human genome. These include in-solution hybridization enrichment, multiplexed-PCR and targeted circularization approaches. Hybrid selection methods apply immobilized oligonucleotides on either microarrays [1-3] or beads [4] to enrich genomic targets from a modified DNA sample. In multiplex-PCR [5], complex primer sets can be utilized to selectively amplify targeted regions prior to modifying DNA for the sequencer. Highly parallel simplex PCR reactions can be conducted with microdroplet technology [6]. In-solution oligonucleotide-based approaches such as molecular inversion probes (MIPs) capture targets by DNA synthesis across the target and ligation that result in circularization of the capture oligonucleotides [7, 8]. Citing another in-solution approach, targeted genomic circularization (TGC) directly captures a genomic DNA target by converting it into a target specific circle using in-solution capture oligonucleotides [9].

[0010] There are limitations with all of the previously described capture methods on genomic DNA from FFPE samples. For example, hybridization enrichment has been applied to cancer samples for single nucleotide variation (SNV) detection [10]. For example, Kerick et al. used the Agilent in-solution hybridization method to investigate reproducibility of SNV detection comparing genomic DNA from FFPE to flash-frozen samples. They demonstrated a false positive rate of approximately 1% when using sequencing coverage greater than 20× coverage. This translates into 1 false mutation caller for every 100 variants identified. In addition, hybridization-based methods have high levels of off-target capture, involve complex workflows that require additional PCR amplification and sample preparation steps. MIP technology has potential advantages for degraded genomic DNA from FFPE samples, but the capture reaction is inefficient for larger targets beyond 200 bps and the assay is extremely complicated in its implementation [11]. Furthermore, with MIPs, the captured regions contain 20 bps of the oligonucleotide-derived sequences and the rest is the reverse-complement of the template DNA, not the original DNA strand. This requires some degree of bioinformatic processing to eliminate synthetic sequence. Capture with the targeted genomic circularization relies on the presence of existing restriction sites in double stranded DNA and requires multiple restriction enzymes which increase the number of reactions needed for a given sample [9]. This can limit the efficiency of capture coverage due to the absence of a suitable restriction site. Furthermore, TGC-capture requires double stranded DNA for restriction enzyme fragmentation while FFPE-derived genomic DNA is generally single stranded. Whole genome amplification using random primers followed by an end-repair step can be used to sequence FFPE-derived genomic DNA, but these amplification steps can skew the representation of certain region even before the capture reaction.

### Specific Patents and Publications

[0011] Dahl et al., “Multiplex amplification enabled by selective circularization of large sets of genomic DNA fragments,” Nucleic Acids Res. 33 e71 (2005), discloses a method for multiplex amplification which uses a general primer pair motif and a vector oligonucleotide selector probe, where the circularization procedure starts with digestion of the DNA to generate targets.

[0012] US patent publication 2008/0199916, by Zheng et al., published Aug. 21, 2008, entitled “Multiplex targeted amplification using flap nuclease,” discloses the use of UDG (uracil-DNA glycosylase) and a flap exonuclease.

[0013] PG Pub 2007/0128635 by Macevicz, entitled “Selected Amplification of Polynucleotides,” discloses a method in which fragments and selection oligonucleotides are combined in a reaction mixture comprising the following enzymatic activities: (i) a 5′ flap endonuclease activity, (ii) a DNA polymerase lacking strand displacement activity, (iii) a 3′ single stranded exonuclease activity, and (iv) a ligase activity.

[0014] WO 2008/033442 A2, “Methods And Compositions For Performing Low Background Multiplex Nucleic Acid Amplification Reactions,” by Fredriksson et al., discloses a method of amplifying target nucleic acids involving circularizing target amplicons in an amplified composition; and selecting for said circularized target amplicons in said amplified composition.

### BRIEF SUMMARY OF THE INVENTION

[0015] The following brief summary is not intended to include all features and aspects of the present invention, nor does it imply that the invention must include all features and aspects discussed in this summary.

[0016] The present invention comprises, in certain aspects, methods and materials for detection and analysis of a large number of random fragments of DNA in a sample. The methods can be used for targeted resequencing of DNA. In certain aspects, the present methods employ a mixture of single-stranded polynucleotide capture probes, a number of universal single stranded oligonucleotides (second polynucleotides) each having the same sequence and hybridizing to a portion of the various capture probes; and a mixture comprising exonucleases and a ligase.

[0017] In certain aspects, the present invention comprises a composition in the form of a reaction mixture useful for preparing a population of double stranded DNA molecules from a sample containing single stranded polynucleic acids, comprising, preferably in a suitable buffer: (a) a plurality of single stranded capture probes, each capture probe containing (i) 5′ and 3′ end capture arms complementary to specific portions of a polynucleic acid in the sample and (ii) an invariant sequence between the capture arms, whereby a circular structure comprising a specific capture probe and a polynucleic acid sample molecule having regions complementary to the capture arms is formed in the buffer; (b) a plurality of second (“universal”) single stranded polynucleotides having a sequence complementary to the invariant sequence and having amplification sites for amplification of a polynucleic acid in a circular structure; and (c) a 5′ exonuclease, a 3′ exonuclease, and a ligase. While “each” capture probe will contain the defined features, it is not to be implied that “every” capture probe in a composition must have these features.

[0018] The single stranded polynucleic acids in the composition may comprise random fragments of human genomic DNA. The fragments may be fixed by crosslinking and embedded in a wax, which makes the composition well suited for dealing with degraded DNA from FFPE samples.

[0019] The composition also comprises at least one of amplification primers and a polymerase for amplification. The amplification sites of the composition comprise PCR primer sites, which may be spaced on the universal polynucleotides about 120 to 250 bases apart.

[0020] In certain embodiments, the composition (reaction mixture) comprises capture probes having a three part construction: two capture arms on the flanks which are able to capture specific single-stranded genomic DNA and a sequence between the two capture arms which is termed a “universal” sequence in that it is essentially the same (“invariant”) among the different probes. The capture probes may be present in the composition as a set of at least 500 different probes, at least 600 different probes, at least 700 different probes, or at least 1000 different probes, each probe having capture arms complementary to different portions of a single stranded polynucleic acid in the sample and having the same universal probe sequence between the two capture arms.

[0021] In certain aspects, the present invention also comprises a method for analyzing single stranded polynucleotides from a sample, comprising the steps of: (a) adding to the sample a plurality of capture probes, each capture probe containing capture arms designed to be complementary to specific portions of a polynucleic acid in the sample and a universal probe sequence between the arms, whereby a circular structure comprising a specific capture probe and a polynucleic acid sample molecule is formed in the buffer; (b) adding to the sample a plurality of universal polynucleotides having a sequence complementary to the universal probe sequence and having amplification sites for amplification of a polynucleic acid in a circular structure; and (c) adding to the sample containing capture probes and universal polynucleotides a mixture of a 5′ exonuclease, a 3′ exonuclease, and a ligase under conditions whereby exonucleases remove bases from the single stranded polynucleotides to form a new 5′ end thereof and a new 3′ end thereof, and the ligase ligates the new 5′ end to the new 3′ end.

[0022] The composition and method described above may also comprise a 5′ exonuclease, which may be Exonuclease I; a 3′ exonuclease, which may be a polymerase or a thermostable polymerase; and a ligase, which may be a thermostable DNA ligase. As described below, the capture arms may hybridize to various portions of the DNA in the sample, leaving “flaps”, which are removed by the exonucleases.

[0023] In certain aspects, the present invention further contemplates a method for analyzing single stranded polynucleotides from a sample, comprising the steps of: (a) adding to the sample a plurality of capture probes, each capture probe containing capture arms complementary to specific portions of a polynucleic acid in the sample and a universal probe sequence between the arms, whereby a circular structure comprising a specific capture probe and a polynucleic acid sample molecule is formed in the buffer; (b) adding to the sample a plurality of universal polynucleotides having a sequence complementary to the universal probe sequence and having amplification sites for amplification of a polynucleic acid in a circular structure; and (c) adding to the sample containing capture probes and universal polynucleotides a mixture of a 5′ exonuclease, a 3′ exonuclease, and a ligase under conditions whereby exonucleases remove bases from the single stranded polynucleotides to form a new 5′ end thereof and a new 3′ end thereof, and the ligase ligates the new 5′ end to the new 3′ end; (d) adding to the sample a polymerase and polymerase primers; and (e) conducting a polymerase chain reaction using the polymerase primers for amplification of a portion of a single stranded polynucleotide captured by a corresponding capture probe.

[0024] The above method may further comprise the step of sequencing amplified polynucleotides from step (e). The polymerase chain reaction conducted step (e) may utilize an annealing temperature of between about 45 degrees Celsius and 55 degrees Celsius.

[0025] The analyzing of the single stranded polynucleotides from a sample may comprise analyzing polynucleotides from a preserved tissue sample or analyzing polynucleotides from a preserved tissue sample and analyzing polynucleotides from a fresh sample from the same individual.

[0026] In certain aspects, the present invention also comprises the preparation of a composition as described herein using a kit. The kit may comprise a set of capture probes and universal oligos. Other reagents, such as enzymes may also be included in the kit. An exemplary set of 628 capture polynucleotides is described in the accompanying sequence listing.

### BRIEF DESCRIPTION OF THE DRAWINGS

[0027] FIG. 1A, 1B is a schematic diagram illustrating an overview of the single stranded DNA capture assay.

[0028] FIGS. 2A, 2B, and 2C is a set of graphs showing the sequencing coverage of targeted resequencing on matched FFPE versus flash-frozen genomic DNA sources in exemplary patients 751 (FIG. 2A), patient 761 (FIG. 2B) and patient 780 (FIG. 2C). Coverage exceeded 85% of all captured regions in each case.

[0029] FIG. 3 is a scatter plot showing where the 2^{nd} base frequency of a given variant is compared from targeted resequencing of genomic DNA from matched flash-frozen versus FFPE samples. The x-axis represents the 2^{nd} base frequency of SNVs identified from FFPE targeted resequencing compared to the y-axis, which indicates the variant base fraction from the flash-frozen genomic DNA.

### DETAILED DESCRIPTION OF THE PREFERRED EMBODIMENT

### Overview

[0030] Described herein is a novel DNA targeting and enrichment method particularly suited for analysis of samples containing fragmented single stranded nucleic acids, such as genomic DNA fragments in a biopsy sample. The method results in highly multiplexed amplification of selected portions of the sample nucleic acid, i.e., the reaction mixture may contain hundreds or thousands of different capture probes for amplification of sample DNA regions spanned by the capture probes. The amplified portions from the reaction may be further analyzed, e.g. by sequencing the amplified portions.

[0031] The present method is an improvement of a previously described technique that required double stranded DNA as input and required that the targeting oligonucleotide probes be placed adjacent to certain restriction sites. For the present approach, the hybridization arms of the capture oligonucleotides do not require a restriction site and the input DNA can be single stranded. This improves the flexibility and the coverage of the design. An important feature of the present capture approach involves using single stranded DNA as input material. Given the need for high heat during processing, the majority of formalin fixed and paraffin embedded (FFPE) derived genomic DNA molecules are generally single stranded. The present approach has a major advantage compared to other methods that rely exclusively on enzymatic manipulations of double stranded genomic DNA. The capture performance is comparable when using genomic DNA derived from flash-frozen versus FFPE processed tissue. Eighty five percent of the heterozygote SNV detected from high quality genomic DNA extracted flash-frozen samples were also detected in targeted resequencing data from the matched FFPE samples. The number of false positive FFPE-specific SNV calls are exceptionally low at one per every 12 Kb of targeted genomic sequence.

[0032] While multiplexed capture assays for hundreds of genomic regions in the present examples is described herein, it is believed the reaction could be scaled to thousands. As published, efficient capture using pools of 5,000 oligonucleotides for restriction enzyme-based targeted circularization has been achieved and it is believed that this new method will scale similarly. For most of the results presented here, we used 4 indexed samples per lane of sequencing (2 flash frozen and 2 FFPE samples). Targeted resequencing projects involving hundreds of exons in hundreds of FFPE samples are therefore achievable and may be implemented with minimal additional steps in a next generation sequencer such as the Illumina HiSeq or GAIIx. In addition, the application of the present approach is demonstrated using the Illumina MiSeq system which is designed for rapid analysis.

[0033] An innovative approach to capture genomic targets from archival genomic DNA with in-solution polynucleotides is described. This approach is fundamentally different than other methods given that it only requires random fragments of single stranded genomic DNA as commonly seen in FFPE samples, is highly scalable for multiplexed target coverage, and does not rely on any whole genome amplification. The capture assay is straightforward, relatively fast and can be implemented with standard molecular biology equipment. The robust performance of the capture assay and comparisons of SNV detection using genomic DNA derived from matched flash-frozen and FFPE samples is demonstrated.

[0034] The technology described utilizes oligonucleotide-mediated genomic capture without the need for double stranded template and the reliance on exiting restriction sites. It also alleviates the need to synthesize the complementary stranded of the template DNA, which can result in significant limits such as the target size.

[0035] Another novel aspect of this capture process is its ability to add desired sequences (such as the adapter sequences required for cluster generation on the Illumina® sequencing system) to DNA fragments without the need for the multi-step process normally associated with such manipulation. This can greatly simplify and accelerate the construction of sequencing libraries. That is, the original

[0036] FIGS. 1A and 1B outline the key materials, intermediates and steps of the capture reaction. As shown in these figures, a number of capture probes 101 and a sample containing numerous fragments of single stranded DNA 102 are mixed in a single tube (Step 1). The term “tube” is used for convenience, in that the reaction area could also be a well in a microtiter plate, a chamber in a microfluidic device, etc. The entire reaction occurs in the single tube and this substantially reduces the complexity of the capture assay process. The capture probes and single stranded DNA fragments are mixed in the presence of Ampligase, TaqPol, and ExoI. The capture probes 101 have capture arms that are different in sequence as between capture probes and are complementary to the ends of the portion of sample DNA 102 to be studied.

[0037] Denatured single-stranded genomic DNA 102 having a 5′ end and a 3′ end is combined with a pool of polynucleotides, termed “capture probes,” that mediate targeted circularization of the regions of interest. Since the size of DNA 102 is unknown and variable (“random”), portions of the DNA 102 will extend 5′ and 3′ from the hybridization sites, as shown in step 1. The capture probes are single stranded DNA molecules that may be e.g. 80 bases long, or in the range of 40 to 300 bases long. A single capture probe will have 5′ capture arm 104, a middle portion 105 (“universal probe sequence”) and a 3′ capture arm 106 (FIG. 1B). The capture arms 104, 106 are typically on the order of 20 bases long, and have a sequence selected for an individual capture probe to target a pre-determined complementary region on the nucleic acid sample. This complementarity is designed to be 100% complementarity. The region targeted will typically be longer than the capture probe; it may, for example, be an exon of a gene. The middle portion 105 of the capture probe (“universal probe sequence”) is selected to have a sequence that will not hybridize to the nucleic acid sample, and its length is chosen depending on the size of the region of the sample (e.g. genomic DNA) being targeted, and in accordance with the size of the universal oligo. While there are many different capture probe sequences, the middle portion of each capture probe will be essentially the same in each capture probe, in order to hybridize to the universal polynucleotides, as explained below.

[0038] Genomic DNA in the sample can come from either flash-frozen or FFPE processed tissue samples. Each capture arm 104, 106 from a single capture probe anneals to a predetermined sequence in a specific genomic DNA fragment 102 containing the complementary sequences. After hybridization, a single-stranded target-specific structure is formed which has 5′ single stranded extension 111 and 3′ single stranded extension 112 of the original genomic target single stranded DNA (FIG. 1B). These extensions 111, 112 of single stranded genomic DNA (that extend past the ends of the targeting arms of the capture probe) are removed or degraded by enzymes. For example 5′ and 3′ extensions (“flaps”) may be removed, respectively, by the 5′ nucleolytic activity of Taq polymerase (activity as disclosed, e.g. in Lyamichev, V., Brow, M. A. & Dahlberg, J. E. (1993) Science 260, 778-783) and the 3′ to 5′ exonucleolytic activity of ExoI [12]. To complete the capture reaction, a universal vector oligonucleotide 108 anneals to the general sequence motif in the middle portion 105 of every capture probe oligonucleotide. Ampligase® thermostable ligase present in the same reaction mix forms covalently closed circles using the universal vector sequence (Step 2). Ampligase® Thermostable DNA Ligase catalyzes NAD-dependent ligation of adjacent 3′-hydroxylated and 5′-phosphorylated termini in duplex DNA structures that are stable at high temperatures.

[0039] Once the circle is complete, universal PCR primers 110 can be used to amplify the intervening target genomic DNA fragment, creating a pool of linear amplicons that can be sequenced (Step 3). The primers are oriented, as shown in FIG. 1B, to amplify the target oligonucleotide; they can be amplified either as an intact circle, or after cleavage of the circle. The resulting double stranded linear DNA population that results from amplification of the set of circles created is then submitted to adapter ligation following the standard Illumina library preparation protocol (Step 4). The primers hybridize to sequences within the universal sequences, so that one set of primers may be used to amplify the entire plurality of different capture probe structures.

[0040] As shown by arrows 110 in FIG. 1B, the PCR amplification can proceed from the primers through part of the general sequence motif in the middle portion 105 of the capture probe. This allows sequences from this motif to be added to and become part of the 5′ and/or 3′ end of the amplified product. For example, bar codes or ligation adapters can be added by including such sequences in the middle portion 105 of the capture probe. A variety of sequencing methods may be used on the amplified products, including massively parallel methods commercially available from Illumina, Roche 454, Life Technologies, Pacific Biosciences, Helicos, etc. The sequencing aspect of the present methods can be used for SNP analysis as well as SNVs that are associated with disease. The sequencing libraries prepared by the present method can be used for paired-end sequencing to obtain greater information from a ssDNA fragment in the sample.

[0041] A variety of buffers can be used with the present compositions. They can contain, e.g. 100 mM Tris-Cl, 500 mM KCl; 600 mM Tris-Cl, 170 mM (NH4)2SO4, 0.1% Tween-20; 375 mM Tris-Cl, 200 mM (NH₄)₂SO₄, 0.1% Tween-20, etc.

### DEFINITIONS

[0042] Unless defined otherwise, all technical and scientific terms used herein have the same meaning as commonly understood by those of ordinary skill in the art to which this invention belongs. Although any methods and materials similar or equivalent to those described herein can be used in the practice or testing of the present invention, the preferred methods and materials are described. Generally, nomenclatures utilized in connection with, and techniques of, cell and molecular biology and chemistry are those well-known and commonly used in the art. Certain experimental techniques, not specifically defined, are generally performed according to conventional methods well known in the art and as described in various general and more specific references that are cited and discussed throughout the present specification. For purposes of clarity, the following terms are defined below.

[0043] Ranges:

[0044] For conciseness, any range set forth is intended to include any sub-range within the stated range, unless otherwise stated. A sub-range is to be included within a range even though no sub-range is explicitly stated in connection with the range. As a nonlimiting example, a range of 120 to 250 includes a range of 120-121, 120-130, 200-225, 121-250 etc. The term “about” has its ordinary meaning of approximately and may be determined in context by experimental variability. In case of doubt, “about” means a variation within 5% of a stated numerical value.

[0045] The term “polynucleotide” corresponds to either double-stranded or single-stranded cDNA or genomic DNA or RNA, containing at least 10 contiguous nucleotides. Single stranded polynucleic acid sequences are always represented in the current invention from the 5′ end to the 3′ end. Polynucleic acids according to the invention may be prepared by any method known in the art for preparing polynucleic acids (e.g. the phosphodiester method for synthesizing oligonucleotides as described by Agarwal et al. (1972), the phosphotriester method of Hsiung et al. (1979), or the automated diethylphosphoroamidite method of Baeucage et al. (1981)). Alternatively, the polynucleic acids of the invention may be isolated fragments of naturally occurring or cloned DNA or RNA.

[0046] The term “oligonucleotide” refers to a single stranded nucleic acid comprising two or more nucleotides, and less than 300 nucleotides. The exact size of an oligonucleotide depends on the ultimate function or use of said oligonucleotide. For use as a probe or primer the oligonucleotides are preferably about 5-50 nucleotides long.

[0047] The oligonucleotides and polynucleotides according to the present invention can be formed by cloning of recombinant plasmids containing inserts including the corresponding nucleotide sequences, if need be by cleaving the latter out from the cloned plasmids upon using the adequate nucleases and recovering them, e.g. by fractionation according to molecular weight. The probes according to the present invention can also be synthesized chemically, e.g. by automatic synthesis on commercial instruments sold by a variety of manufacturers.

[0048] The nucleotides as used in the present invention may, in certain aspects, be ribonucleotides, deoxyribonucleotides and modified nucleotides such as inosine or nucleotides containing modified groups which do not essentially alter their hybridisation characteristics. Moreover, it is obvious to the man skilled in the art that any of the below-specified probes can be used as such, or in their complementary form, or in their RNA form (wherein T is replaced by U).

[0049] The oligonucleotides used as primers or probes may also comprise or consist of nucleotide analogues such as phosphorothioates (Matsukura et al., 1987). alkylphosphorothioiates (Miller et al., 1979) or peptide nucleic acids (Nielsen et al., 1991; Nielsen et al., 1993) or may contain intercalating agents (Asseline et al., 1984).

[0050] The term “probe” refers to single stranded sequencespecific oligonucleotides which have a sequence which is sufficiently complementary to hybridize to the target sequence to be detected. Preferably said probes are 70%, 80%, 90%, or more than 95% homologous to the exact complement of the target sequence to be detected. These target sequences are either genomic DNA or messenger RNA, or amplified versions thereof. Preferably, these probes are about 5 to 50 nucleotides long, more preferably from about 10 to 30 nucleotides.

[0051] The term “hybridizes to” refers to preferably stringent hybridizations conditions, allowing hybridisation between complementary nucleic acid sequences showing at least 90%, 95% or more homology with each other.

[0052] The term “primer” refers to a single stranded DNA oligonucleotide sequence capable of acting as a point of initiation for synthesis of a primer extension product which 5 is complementary to the nucleic acid strand to be copied. The length and the sequence of the primer must be such that they allow to prime the synthesis of the extension products. Preferably the primer is about 5-50 nucleotides long. Specific length and sequence will depend on the complexity of the required DNA or RNA targets, as well as on the conditions of primer use such as temperature and ionic strength. The fact that amplification primers do not have to match exactly with the corresponding template sequence to warrant proper amplification is amply documented in the literature. The amplification method used can be either polymerase chain reaction, target polynucleotide amplification methods such as self-sustained sequence replication (3SR) and strand-displacement amplification (SDA); methods based on amplification of a signal attached to the target polynucleotide, such as “branched chain” DNA amplification; methods based on amplification of probe DNA, such as ligase chain reaction (LCR) and QB replicase amplification (QBR); transcription-based methods, such as ligation activated transcription (LAT), nucleic acid sequence-based amplification (NASBA), amplification under the trade name INVADER, and transcription-mediated amplification (TMA); and various other amplification methods, such as repair chain reaction (RCR) and cycling probe reaction (CPR). Preferred methods can be multiplexed, i.e. a number of amplifications of different sequences can be run in the same reaction mixture at the same time.

[0053] The term “complementary” nucleic acids as used in the current invention means that the nucleic acid sequences can form a perfect base paired double helix with each other.

[0054] The term “FFPE” refers to formalin-fixed, paraffin-embedded (FFPE) tissue samples. Commercial solutions of formadehyde in water are commonly called formalin. Formalin preserves or fixes tissue or cells by reversibly cross-linking primary amino groups in proteins with other nearby nitrogen atoms in protein or DNA through a —CH₂— linkage.

[0055] Tissue samples are typically placed into molds along with liquid embedding material (such as agar, gelatine, or wax) which is then hardened. This is achieved by cooling in the case of paraffin wax and heating (curing) in the case of the epoxy resins. The acrylic resins are polymerised by heat, ultraviolet light, or chemical catalysts. The hardened blocks containing the tissue samples are then ready to be sectioned.

[0056] Another aldehyde that can be used for fixation is glutaraldehyde. It operates in a similar way to formaldehyde by causing deformation of the alpha-helix structures in proteins. However, glutaraldehyde is a larger molecule, and so its rate of diffusion across membranes is slower than formaldehyde.

[0057] Samples that may be used in the present invention include medical samples, forensic samples, museum or archeological samples, and other archival collections, which need not be FFPE preserved. There are many preservation methods that have been applied to tissues, including alcohol preservation, formalin treatment, freezing and sequestration in waxes and other materials. In addition, forensic or archeological samples may contain degraded ssDNA that has not been consciously preserved at all.

[0058] The term “5′ exonuclease” or “5′ end nuclease” refers to an enzyme that has activity 5′ to 3′ direction to remove a single stranded DNA having a 5′ end. It may do this through exonuclease or endonuclease activity, i.e. cleavage at a point where the ssDNA separates from its complementary strand. The 5′ exonuclease enzymes used herein preferably degrade single stranded DNA, not double stranded DNA. The preferred 5′ exonuclease is a DNA polymerase that has the ability to cleave a DNA hairpin where a 5′ end of DNA to be cleaved is a single strand adjacent to a double strand, which may result from formation of an exogenous duplex, such as hybridization to a primer. For details, see Lyamichev et al. “Structure-Specific Endonucleolytic Cleavage of Nucleic Acids by Eubacterial DNA Polymerases,” Science 260:778-783 (1993), describing this activity in DNAP-Ecl and DNAP-Taq (from Thermus aquaticus) polymerases.

[0059] The term “3′ exonuclease” or “3′ end nuclease” refers to an enzyme having activity in the 3′ to 5′ direction to remove a single stranded DNA portion having a 3′ end. As with the 5′ exonuclease, the enzyme will only act on ssDNA and may do this by either exonuclease or endonuclease activity. This activity is found as DNA proofreading in certain DNA polymerases. It allows the enzyme to check each nucleotide during DNA synthesis, and excise mismatched nucleotides in the 3′ to 5′ direction. The proofreading domain also enables a polymerase to remove unpaired 3′ overhanging nucleotides to create blunt ends. Protocols such as high-fidelity PCR, 3′ overhang polishing and high-fidelity second strand synthesis require the presence of a 3′→5′ exonuclease.

[0060] The preferred 3′ exonuclease is Exo I. Exonuclease I (Exo I), the product of the sbcB gene of E. coli, is an exodeoxyribonuclease that hydrolyzes single-stranded (ss)DNA stepwise in a 3′ to 5′ direction. 1-3 Hydrolysis generates deoxyribonucleoside 5′-monophosphates and a terminal dinucleotide diphosphate. The enzyme requires magnesium (optimal Mg++ concentration is 10 mM) and the presence of a free 3′-hydroxyl terminus. Exonuclease I is active under a wide variety of buffer conditions, allowing addition of the enzyme directly into most reaction mixes. Heat inactivation results from incubation at 80° C. for 15 minutes.

[0061] The term “ligase” refers to an enzyme that catalyzes formation of a phosphodiester bond between the 5′ phosphate of one strand of DNA and the 3′ hydroxyl of the other. This enzyme is used to covalently link or ligate fragments of DNA together. An example of a DNA ligase is one derived from the T4 bacteriophage. T4 DNA ligase requires ATP as a cofactor. The presently preferred ligase is Ampligase® ligase (registered trademark of Epicentre Technologies), a thermostable DNA ligase that catalyzes NAD-dependent ligation of adjacent 3′-hydroxylated and 5′-phosphorylated termini in duplex DNA structures that are stable at high temperatures.

[0062] For convenience, certain polynucleotides are referred to herein as “capture probes,” meaning single stranded polynucleotides of relatively small size, e.g. 40-4000 bases, which are prepared (e.g. synthetically) to contain defined features. These include certain “universal” sequences, which are so designated because they are essentially identical as between different polynucleotides designed for the stated purpose, whereas other sequences in the capture probes will vary among a number of different possibilities to capture different targets. That is, the capture probes contain a “universal probe sequence” which contains a single sequence common to all capture probes. In this way, the “universal polynucleotides” may have a single sequence that is complementary to the universal sequence in the capture probes.

### EXAMPLES

### Example 1

### Oligonucleotide Design, Target DNA Capture, and Sequencing

### Samples

[0063] Genomic DNA from NA18507 was obtained from Corriel Cell Repositories. Intestinal tissue samples were obtained from under an IRB protocol approved by Stanford University. These samples were either immediately snap frozen in liquid nitrogen and stored at −80° C. or preserved as formalin-fixed, paraffin-embedded (FFPE) blocks. Total nucleic acids were extracted from the flash-frozen tissue using the SQ DNA/RNA/Protein Kit from Omega Bio-Tek. Following complete RNase A digestion, the DNA (herein referred as dsDNA) was analyzed by argarose gel electrophoresis and quantified by a fluorescence assay using SYBR Gold (Invitrogen). For FFPE samples, DNA was isolated using the BiOstic® FFPE Tissue DNA Isolation Kit from Mo Bio Laboratories. The quantity and quality of the preparations were by OD260 and qPCR analysis across 3 different genomic loci. Only single stranded DNA (ssDNA) samples with a difference in Ct values of equal or less than 4.0 or approximately 15% genome equivalence between the flash-frozen and FFPE samples were used for subsequent analysis.

### Capture Polynucleotides and Sequence Listing

[0064] Capture polynucleotides with the properties optimal for FFPE capture were chosen from a larger, previously described set (Natsoulis et al. 2011, Ref. 9). As disclosed there, the oligonucleotide sequences can be downloaded from the Human OligoExome, a database which provides gene exons annotated by the Consensus Coding Sequencing Project (CCDS). The database is available at oligoexome.Stanford.edu. 628 capture oligonucleotides resulting in amplicons ranging from 150 to 250 bp were chosen from this set. 2,512 sequences containing sequences of the 5′ targeting arm, 3′ targeting arm, amplicon, and target oligonucleotide for each of the 628 capture oligonucleotides were compiled. Targeting arms were positioned in regions without SNPs per dbSNP. Details on the design parameters and on the capture characteristics of the targeting arms are provided by Natsoulis et al. [9].

[0065] The accompanying sequence listing sets forth the sequences of the 5′ targeting arm, the 3′ targeting arm, the amplicon sequence and the universal oligonucleotide used, including uridine substitutions for the 628 capture probes used in the examples. In the table below, Column 1 is the chromosome number targeted; column 2 is the position of the 5′ end of the targeted sequence; col. 3 is the polarity of the targeted strand; column 4 (SEQ ID NOs) is sequence of the 20 bp 5′ targeting arm; column 5 (SEQ ID NOs) is the sequence of the 3′ 20 bp selector; column 6 (SEQ ID NOs) lists the sequences of the amplicons and column 7 (SEQ ID NOs) lists the sequences of the targeting oligonucleotides (“universal probes”) including uridine substitutions; and column 8 is the identifier (which may also be checked at the Stanford OligoExome web site).

| | | | Col. 4 | Col. 5 | Col. 6 | Col. 7 | |
|---|---|---|---|---|---|---|---|
| Col. 1 | Col. 2 | Col. 3 | SEQ ID NO: | SEQ ID NO: | SEQ ID NO: | SEQ ID NO: | Col. 8 |
| 2 | 197978441 | minus | 1 | 2 | 3 | 4 | SF3B1_ROI_10 |
| 7 | 81531606 | minus | 5 | 6 | 7 | 8 | CACNA2D1_ROI_9 |
| 3 | 73516265 | minus | 9 | 10 | 11 | 12 | PDZRN3_ROI_10 |
| 18 | 32189513 | minus | 13 | 14 | 15 | 16 | FHOD3_ROI_2 |
| 7 | 81481731 | minus | 17 | 18 | 19 | 20 | CACNA2D1_ROI_13 |
| 4 | 1777300 | minus | 21 | 22 | 23 | 24 | FGFR3_ROI_8 |
| 6 | 3022048 | plus | 25 | 26 | 27 | 28 | RIPK1_ROI_1 |
| 1 | 56934140 | minus | 29 | 30 | 31 | 32 | PRKAA2_ROI_6 |
| 22 | 28364929 | plus | 33 | 34 | 35 | 36 | NF2_ROI_3 |
| 15 | 20512084 | plus | 37 | 38 | 39 | 40 | CYFIP1_ROI_15 |
| 7 | 98397711 | plus | 41 | 42 | 43 | 44 | TRRAP_ROI_41 |
| 7 | 98401105 | plus | 45 | 46 | 47 | 48 | TRRAP_ROI_43 |
| 6 | 3049527 | minus | 49 | 50 | 51 | 52 | RIPK1_ROI_7 |
| 18 | 57318446 | plus | 53 | 54 | 55 | 56 | CDH20_ROI_3 |
| 20 | 61808885 | minus | 57 | 58 | 59 | 60 | ARFRP1_ROI_1 |
| 19 | 10959598 | minus | 61 | 62 | 63 | 64 | SMARCA4_ROI_5 |
| 2 | 106813126 | minus | 65 | 66 | 67 | 68 | ST6GAL2_ROI_4 |
| 15 | 65266899 | minus | 69 | 70 | 71 | 72 | SMAD3_ROI_8 |
| 18 | 51168635 | minus | 73 | 74 | 75 | 76 | TCF4_ROI_7 |
| 12 | 50666736 | minus | 77 | 78 | 79 | 80 | ACVR1B_ROI_7 |
| 3 | 89472909 | minus | 81 | 82 | 83 | 84 | EPHA3_ROI_4 |
| 23 | 69635044 | minus | 85 | 86 | 87 | 88 | DLG3_ROI_17 |
| 7 | 148157809 | minus | 89 | 90 | 91 | 92 | EZH2_ROI_4 |
| 7 | 98391555 | plus | 93 | 94 | 95 | 96 | TRRAP_ROI_37 |
| 8 | 113461681 | minus | 97 | 98 | 99 | 100 | CSMD3_ROI_39 |
| 10 | 55296258 | plus | 101 | 102 | 103 | 104 | PCDH15_ROI_26 |
| 4 | 1778491 | plus | 105 | 106 | 107 | 108 | FGFR3_ROI_12 |
| 1 | 6117503 | minus | 109 | 110 | 111 | 112 | CHD5_ROI_16 |
| 22 | 28400927 | minus | 113 | 114 | 115 | 116 | NF2_ROI_13 |
| 11 | 85666939 | plus | 117 | 118 | 119 | 120 | EED_ROI_12 |
| 19 | 10982204 | minus | 121 | 122 | 123 | 124 | SMARCA4_ROI_14 |
| 5 | 112129928 | minus | 125 | 126 | 127 | 128 | APC_ROI_2 |
| 15 | 65269671 | minus | 129 | 130 | 131 | 132 | SMAD3_ROI_9 |
| 1 | 11115574 | plus | 133 | 134 | 135 | 136 | FRAP1_ROI_35 |
| 19 | 35000025 | minus | 137 | 138 | 139 | 140 | CCNE1_ROI_4 |
| 20 | 35461947 | minus | 141 | 142 | 143 | 144 | SRC_ROI_7 |
| 11 | 107633539 | minus | 145 | 146 | 147 | 148 | ATM_ROI_13 |
| 1 | 173603051 | minus | 149 | 150 | 151 | 152 | TNR_ROI_8 |
| 1 | 6093131 | minus | 153 | 154 | 155 | 156 | CHD5_ROI_34 |
| 7 | 140124110 | plus | 157 | 158 | 159 | 160 | BRAF_ROI_12 |
| 18 | 46838465 | minus | 161 | 162 | 163 | 164 | SMAD4_ROI_5 |
| 23 | 85954365 | plus | 165 | 166 | 167 | 168 | DACH2_ROI_8 |
| 3 | 132282116 | minus | 169 | 170 | 171 | 172 | NEK11_ROI_2 |
| 23 | 69638588 | plus | 173 | 174 | 175 | 176 | DLG3_ROI_22 |
| 15 | 20487399 | minus | 177 | 178 | 179 | 180 | CYFIP1_ROI_6 |
| 15 | 20479945 | minus | 181 | 182 | 183 | 184 | CYFIP1_ROI_3 |
| 6 | 80806019 | minus | 185 | 186 | 187 | 188 | TTK_ROI_17 |
| 2 | 197966150 | minus | 189 | 190 | 191 | 192 | SF3B1_ROI_21 |
| 12 | 77093105 | minus | 193 | 194 | 195 | 196 | NAV3_ROI_25 |
| 4 | 55260662 | minus | 197 | 198 | 199 | 200 | KIT_ROI_4 |
| 1 | 11110373 | minus | 201 | 202 | 203 | 204 | FRAP1_ROI_41 |
| 23 | 122364376 | plus | 205 | 206 | 207 | 208 | GRIA3_ROI_8 |
| 8 | 113771268 | minus | 209 | 210 | 211 | 212 | CSMD3_ROI_15 |
| 3 | 89604424 | minus | 213 | 214 | 215 | 216 | EPHA3_ROI_16 |
| 2 | 179352082 | minus | 217 | 218 | 219 | 220 | TTN_ROI_22 |
| 5 | 24524011 | minus | 221 | 222 | 223 | 224 | CDH10_ROI_11 |
| 11 | 64331720 | minus | 225 | 226 | 227 | 228 | MEN1_ROI_3 |
| 19 | 11013228 | minus | 229 | 230 | 231 | 232 | SMARCA4_ROI_29 |
| 23 | 69585530 | minus | 233 | 234 | 235 | 236 | DLG3_ROI_2 |
| 11 | 107619747 | minus | 237 | 238 | 239 | 240 | ATM_ROI_4 |
| 1 | 74782245 | minus | 241 | 242 | 243 | 244 | TNNI3K_ROI_23 |
| 10 | 42922016 | minus | 245 | 246 | 247 | 248 | RET_ROI_5 |
| 2 | 79990425 | minus | 249 | 250 | 251 | 252 | CTNNA2_ROI_6 |
| 2 | 197978280 | plus | 253 | 254 | 255 | 256 | SF3B1_ROI_10 |
| 10 | 89714874 | plus | 257 | 258 | 259 | 260 | PTEN_ROI_9 |
| 7 | 55234021 | minus | 261 | 262 | 263 | 264 | EGFR_ROI_24 |
| 16 | 23629188 | plus | 265 | 266 | 267 | 268 | ERN2_ROI_3 |
| 15 | 20542653 | minus | 269 | 270 | 271 | 272 | CYFIP1_ROI_22 |
| 18 | 41921446 | minus | 273 | 274 | 275 | 276 | ATP5A1_ROI_6 |
| 23 | 69590881 | minus | 277 | 278 | 279 | 280 | DLG3_ROI_10 |
| 5 | 24628976 | plus | 281 | 282 | 283 | 284 | CDH10_ROI_1 |
| 18 | 49086077 | minus | 285 | 286 | 287 | 288 | DCC_ROI_13 |
| 19 | 10999310 | plus | 289 | 290 | 291 | 292 | SMARCA4_ROI_23 |
| 17 | 10377190 | minus | 293 | 294 | 295 | 296 | MYH2_ROI_13 |
| 2 | 179372871 | minus | 297 | 298 | 299 | 300 | TTN_ROI_4 |
| 13 | 31804798 | plus | 301 | 302 | 303 | 304 | BRCA2_ROI_8 |
| 7 | 151467266 | minus | 305 | 306 | 307 | 308 | MLL3_ROI_56 |
| 1 | 173559224 | minus | 309 | 310 | 311 | 312 | TNR_ROI_21 |
| 18 | 32189350 | plus | 313 | 314 | 315 | 316 | FHOD3_ROI_2 |
| 10 | 55332859 | plus | 317 | 318 | 319 | 320 | PCDH15_ROI_25 |
| 11 | 107723290 | minus | 321 | 322 | 323 | 324 | ATM_ROI_56 |
| 8 | 113392559 | minus | 325 | 326 | 327 | 328 | CSMD3_ROI_51 |
| 8 | 37809872 | minus | 329 | 330 | 331 | 332 | GPR124_ROI_9 |
| 19 | 10993251 | plus | 333 | 334 | 335 | 336 | SMARCA4_ROI_18 |
| 23 | 47309470 | minus | 337 | 338 | 339 | 340 | ARAF_ROI_3 |
| 13 | 31810986 | plus | 341 | 342 | 343 | 344 | BRCA2_ROI_9 |
| 12 | 77039778 | minus | 345 | 346 | 347 | 348 | NAV3_ROI_16 |
| 12 | 130056498 | minus | 349 | 350 | 351 | 352 | GPR133_ROI_11 |
| 2 | 197980963 | minus | 353 | 354 | 355 | 356 | SF3B1_ROI_9 |
| 6 | 3056175 | minus | 357 | 358 | 359 | 360 | RIPK1_ROI_9 |
| 12 | 119918586 | minus | 361 | 362 | 363 | 364 | HNF1A_ROI_5 |
| 7 | 81479256 | plus | 365 | 366 | 367 | 368 | CACNA2D1_ROI_15 |
| 23 | 85856366 | minus | 369 | 370 | 371 | 372 | DACH2_ROI_6 |
| 20 | 35461782 | plus | 373 | 374 | 375 | 376 | SRC_ROI_7 |
| 17 | 7518320 | minus | 377 | 378 | 379 | 380 | TP53_ROI_5 |
| 20 | 35464392 | minus | 381 | 382 | 383 | 384 | SRC_ROI_9 |
| 7 | 148157603 | plus | 385 | 386 | 387 | 388 | EZH2_ROI_4 |
| 7 | 113346109 | minus | 389 | 390 | 391 | 392 | PPP1R3A_ROI_1 |
| 4 | 55286630 | plus | 393 | 394 | 395 | 396 | KIT_ROI_9 |
| 10 | 55257300 | minus | 397 | 398 | 399 | 400 | PCDH15_ROI_31 |
| 1 | 6092590 | minus | 401 | 402 | 403 | 404 | CHD5_ROI_35 |
| 2 | 1405894 | minus | 405 | 406 | 407 | 408 | TPO_ROI_2 |
| 13 | 31842389 | plus | 409 | 410 | 411 | 412 | BRCA2_ROI_17 |
| 1 | 173639039 | minus | 413 | 414 | 415 | 416 | TNR_ROI_2 |
| 18 | 20896668 | minus | 417 | 418 | 419 | 420 | ZNF521_ROI_7 |
| 7 | 81533723 | minus | 421 | 422 | 423 | 424 | CACNA2D1_ROI_8 |
| 4 | 1777450 | minus | 425 | 426 | 427 | 428 | FGFR3_ROI_8 |
| 1 | 173598272 | plus | 429 | 430 | 431 | 432 | TNR_ROI_12 |
| 5 | 112182432 | plus | 433 | 434 | 435 | 436 | APC_ROI_9 |
| 20 | 29589493 | plus | 437 | 438 | 439 | 440 | HM13_ROI_3 |
| 1 | 74569805 | minus | 441 | 442 | 443 | 444 | TNNI3K_ROI_6 |
| 4 | 138672620 | minus | 445 | 446 | 447 | 448 | PCDH18_ROI_1 |
| 3 | 180405054 | minus | 449 | 450 | 451 | 452 | PIK3CA_ROI_5 |
| 6 | 80778400 | minus | 453 | 454 | 455 | 456 | TTK_ROI_6 |
| 12 | 130037831 | minus | 457 | 458 | 459 | 460 | GPR133_ROI_5 |
| 2 | 179332128 | minus | 461 | 462 | 463 | 464 | TTN_ROI_37 |
| 6 | 3028510 | minus | 465 | 466 | 467 | 468 | RIPK1_ROI_4 |
| 8 | 113881663 | minus | 469 | 470 | 471 | 472 | CSMD3_ROI_14 |
| 7 | 98327833 | plus | 473 | 474 | 475 | 476 | TRRAP_ROI_4 |
| 20 | 29566181 | minus | 477 | 478 | 479 | 480 | HM13_ROI_1 |
| 8 | 113368401 | minus | 481 | 482 | 483 | 484 | CSMD3_ROI_59 |
| 19 | 1002034 | minus | 485 | 486 | 487 | 488 | ABCA7_ROI_14 |
| 23 | 122366090 | plus | 489 | 490 | 491 | 492 | GRIA3_ROI_10 |
| 13 | 31798088 | plus | 493 | 494 | 495 | 496 | BRCA2_ROI_4 |
| 19 | 10967739 | plus | 497 | 498 | 499 | 500 | SMARCA4_ROI_9 |
| 15 | 20487151 | plus | 501 | 502 | 503 | 504 | CYFIP1_ROI_6 |
| 23 | 122426247 | plus | 505 | 506 | 507 | 508 | GRIA3_ROI_13 |
| 15 | 20512312 | minus | 509 | 510 | 511 | 512 | CYFIP1_ROI_15 |
| 11 | 107633350 | minus | 513 | 514 | 515 | 516 | ATM_ROI_13 |
| 3 | 49874078 | plus | 517 | 518 | 519 | 520 | CAMKV_ROI_3 |
| 17 | 35134965 | minus | 521 | 522 | 523 | 524 | ERBB2_ROI_18 |
| 1 | 173615171 | minus | 525 | 526 | 527 | 528 | TNR_ROI_7 |
| 23 | 122215055 | minus | 529 | 530 | 531 | 532 | GRIA3_ROI_3 |
| 19 | 998634 | minus | 533 | 534 | 535 | 536 | ABCA7_ROI_11 |
| 19 | 10990483 | plus | 537 | 538 | 539 | 540 | SMARCA4_ROI_16 |
| 18 | 49102265 | plus | 541 | 542 | 543 | 544 | DCC_ROI_14 |
| 5 | 14540423 | plus | 545 | 546 | 547 | 548 | TRIO_ROI_47 |
| 6 | 3022200 | minus | 549 | 550 | 551 | 552 | RIPK1_ROI_1 |
| 4 | 55260490 | plus | 553 | 554 | 555 | 556 | KIT_ROI_4 |
| 7 | 98371213 | minus | 557 | 558 | 559 | 560 | TRRAP_ROI_26 |
| 6 | 70138988 | plus | 561 | 562 | 563 | 564 | BAI3_ROI_28 |
| 2 | 47863727 | plus | 565 | 566 | 567 | 568 | MSH6_ROI_1 |
| 15 | 20542423 | plus | 569 | 570 | 571 | 572 | CYFIP1_ROI_22 |
| 20 | 35465175 | minus | 573 | 574 | 575 | 576 | SRC_ROI_11 |
| 19 | 11030314 | plus | 577 | 578 | 579 | 580 | SMARCA4_ROI_31 |
| 12 | 76939508 | plus | 581 | 582 | 583 | 584 | NAV3_ROI_9 |
| 2 | 179374960 | plus | 585 | 586 | 587 | 588 | TTN_ROI_2 |
| 17 | 10375909 | minus | 589 | 590 | 591 | 592 | MYH2_ROI_14 |
| 5 | 14452158 | minus | 593 | 594 | 595 | 596 | TRIO_ROI_29 |
| 18 | 32410317 | minus | 597 | 598 | 599 | 600 | FHOD3_ROI_6 |
| 3 | 132430096 | minus | 601 | 602 | 603 | 604 | NEK11_ROI_12 |
| 8 | 113654983 | minus | 605 | 606 | 607 | 608 | CSMD3_ROI_25 |
| 7 | 98440747 | minus | 609 | 610 | 611 | 612 | TRRAP_ROI_63 |
| 6 | 3030397 | minus | 613 | 614 | 615 | 616 | RIPK1_ROI_5 |
| 19 | 1008764 | plus | 617 | 618 | 619 | 620 | ABCA7_ROI_27 |
| 17 | 26687327 | plus | 621 | 622 | 623 | 624 | NF1_ROI_41 |
| 23 | 69582111 | minus | 625 | 626 | 627 | 628 | DLG3_ROI_1 |
| 7 | 151480573 | plus | 629 | 630 | 631 | 632 | MLL3_ROI_48 |
| 1 | 58744170 | plus | 633 | 634 | 635 | 636 | OMA1_ROI_6 |
| 8 | 113306238 | plus | 637 | 638 | 639 | 640 | CSMD3_ROI_72 |
| 17 | 26688035 | minus | 641 | 642 | 643 | 644 | NF1_ROI_42 |
| 5 | 24545302 | plus | 645 | 646 | 647 | 648 | CDH10_ROI_6 |
| 19 | 10325887 | minus | 649 | 650 | 651 | 652 | TYK2_ROI_13 |
| 6 | 41663548 | minus | 653 | 654 | 655 | 656 | FOXP4_ROI_7 |
| 1 | 6092956 | plus | 657 | 658 | 659 | 660 | CHD5_ROI_34 |
| 23 | 70600532 | minus | 661 | 662 | 663 | 664 | TAF1_ROI_36 |
| 1 | 6089133 | minus | 665 | 666 | 667 | 668 | CHD5_ROI_37 |
| 18 | 51087922 | minus | 669 | 670 | 671 | 672 | TCF4_ROI_10 |
| 1 | 173598457 | plus | 673 | 674 | 675 | 676 | TNR_ROI_12 |
| 15 | 20549735 | plus | 677 | 678 | 679 | 680 | CYFIP1_ROI_25 |
| 19 | 1004178 | plus | 681 | 682 | 683 | 684 | ABCA7_ROI_18 |
| 6 | 41663374 | minus | 685 | 686 | 687 | 688 | FOXP4_ROI_7 |
| 22 | 28384229 | minus | 689 | 690 | 691 | 692 | NF2_ROI_7 |
| 8 | 113335653 | minus | 693 | 694 | 695 | 696 | CSMD3_ROI_64 |
| 1 | 6110543 | plus | 697 | 698 | 699 | 700 | CHD5_ROI_22 |
| 8 | 114457993 | plus | 701 | 702 | 703 | 704 | CSMD3_ROI_2 |
| 17 | 26532904 | minus | 705 | 706 | 707 | 708 | NF1_ROI_7 |
| 11 | 107626580 | plus | 709 | 710 | 711 | 712 | ATM_ROI_8 |
| 8 | 113598298 | minus | 713 | 714 | 715 | 716 | CSMD3_ROI_29 |
| 3 | 73535839 | plus | 717 | 718 | 719 | 720 | PDZRN3_ROI_4 |
| 12 | 130056320 | plus | 721 | 722 | 723 | 724 | GPR133_ROI_11 |
| 14 | 102504422 | minus | 725 | 726 | 727 | 728 | CDC42BPB_ROI_15 |
| 10 | 55370482 | plus | 729 | 730 | 731 | 732 | PCDH15_ROI_23 |
| 11 | 85638836 | plus | 733 | 734 | 735 | 736 | EED_ROI_2 |
| 16 | 67406769 | plus | 737 | 738 | 739 | 740 | CDH1_ROI_10 |
| 5 | 14431209 | minus | 741 | 742 | 743 | 744 | TRIO_ROI_20 |
| 2 | 179365142 | minus | 745 | 746 | 747 | 748 | TTN_ROI_8 |
| 2 | 179377374 | plus | 749 | 750 | 751 | 752 | TTN_ROI_1 |
| 12 | 130186634 | minus | 753 | 754 | 755 | 756 | GPR133_ROI_21 |
| 2 | 179363060 | minus | 757 | 758 | 759 | 760 | TTN_ROI_10 |
| 4 | 1771021 | minus | 761 | 762 | 763 | 764 | FGFR3_ROI_2 |
| 2 | 80669895 | minus | 765 | 766 | 767 | 768 | CTNNA2_ROI_14 |
| 7 | 113307388 | minus | 769 | 770 | 771 | 772 | PPP1R3A_ROI_3 |
| 23 | 70246581 | plus | 773 | 774 | 775 | 776 | IL2RG_ROI_4 |
| 19 | 10325294 | minus | 777 | 778 | 779 | 780 | TYK2_ROI_14 |
| 12 | 119911190 | minus | 781 | 782 | 783 | 784 | HNF1A_ROI_2 |
| 18 | 48121006 | plus | 785 | 786 | 787 | 788 | DCC_ROI_1 |
| 5 | 112144471 | minus | 789 | 790 | 791 | 792 | APC_ROI_5 |
| 1 | 6106725 | minus | 793 | 794 | 795 | 796 | CHD5_ROI_28 |
| 4 | 107373641 | minus | 797 | 798 | 799 | 800 | MGC16169_ROI_14 |
| 14 | 102480548 | minus | 801 | 802 | 803 | 804 | CDC42BPB_ROI_29 |
| 2 | 179347763 | plus | 805 | 806 | 807 | 808 | TTN_ROI_26 |
| 6 | 69741756 | minus | 809 | 810 | 811 | 812 | BAI3_ROI_8 |
| 1 | 58777086 | minus | 813 | 814 | 815 | 816 | OMA1_ROI_1 |
| 1 | 6125223 | minus | 817 | 818 | 819 | 820 | CHD5_ROI_13 |
| 8 | 114458170 | minus | 821 | 822 | 823 | 824 | CSMD3_ROI_2 |
| 12 | 130004814 | plus | 825 | 826 | 827 | 828 | GPR133_ROI_1 |
| 8 | 113771425 | minus | 829 | 830 | 831 | 832 | CSMD3_ROI_15 |
| 19 | 10991347 | minus | 833 | 834 | 835 | 836 | SMARCA4_ROI_17 |
| 19 | 10984475 | plus | 837 | 838 | 839 | 840 | SMARCA4_ROI_15 |
| 2 | 106789533 | minus | 841 | 842 | 843 | 844 | ST6GAL2_ROI_5 |
| 19 | 10956019 | minus | 845 | 846 | 847 | 848 | SMARCA4_ROI_1 |
| 11 | 85665798 | minus | 849 | 850 | 851 | 852 | EED_ROI_10 |
| 6 | 3055886 | plus | 853 | 854 | 855 | 856 | RIPK1_ROI_9 |
| 12 | 25253986 | minus | 857 | 858 | 859 | 860 | KRAS_ROI_5 |
| 9 | 93528815 | minus | 861 | 862 | 863 | 864 | ROR2_ROI_8 |
| 1 | 64415549 | plus | 865 | 866 | 867 | 868 | ROR1_ROI_9 |
| 7 | 98412584 | minus | 869 | 870 | 871 | 872 | TRRAP_ROI_50 |
| 6 | 3028223 | minus | 873 | 874 | 875 | 876 | RIPK1_ROI_4 |
| 17 | 35134678 | plus | 877 | 878 | 879 | 880 | ERBB2_ROI_18 |
| 3 | 132429912 | plus | 881 | 882 | 883 | 884 | NEK11_ROI_12 |
| 15 | 20506689 | minus | 885 | 886 | 887 | 888 | CYFIP1_ROI_12 |
| 11 | 107708549 | plus | 889 | 890 | 891 | 892 | ATM_ROI_50 |
| 6 | 41664415 | minus | 893 | 894 | 895 | 896 | FOXP4_ROI_8 |
| 12 | 119921304 | plus | 897 | 898 | 899 | 900 | HNF1A_ROI_8 |
| 18 | 32578121 | minus | 901 | 902 | 903 | 904 | FHOD3_ROI_20 |
| 11 | 107701845 | plus | 905 | 906 | 907 | 908 | ATM_ROI_44 |
| 5 | 14422333 | plus | 909 | 910 | 911 | 912 | TRIO_ROI_18 |
| 7 | 98345465 | plus | 913 | 914 | 915 | 916 | TRRAP_ROI_14 |
| 15 | 20498252 | plus | 917 | 918 | 919 | 920 | CYFIP1_ROI_10 |
| 15 | 20479614 | minus | 921 | 922 | 923 | 924 | CYFIP1_ROI_2 |
| 15 | 20492019 | plus | 925 | 926 | 927 | 928 | CYFIP1_ROI_8 |
| 15 | 20554394 | minus | 929 | 930 | 931 | 932 | CYFIP1_ROI_28 |
| 12 | 25269940 | minus | 933 | 934 | 935 | 936 | KRAS_ROI_3 |
| 3 | 49874248 | minus | 937 | 938 | 939 | 940 | CAMKV_ROI_3 |
| 1 | 64397295 | minus | 941 | 942 | 943 | 944 | ROR1_ROI_8 |
| 17 | 10379373 | minus | 945 | 946 | 947 | 948 | MYH2_ROI_12 |
| 7 | 151486731 | plus | 949 | 950 | 951 | 952 | MLL3_ROI_43 |
| 16 | 23628844 | plus | 953 | 954 | 955 | 956 | ERN2_ROI_4 |
| 17 | 26604010 | minus | 957 | 958 | 959 | 960 | NF1_ROI_31 |
| 23 | 70518168 | plus | 961 | 962 | 963 | 964 | TAF1_ROI_9 |
| 7 | 151533118 | minus | 965 | 966 | 967 | 968 | MLL3_ROI_25 |
| 8 | 114360074 | minus | 969 | 970 | 971 | 972 | CSMD3_ROI_4 |
| 3 | 41252069 | plus | 973 | 974 | 975 | 976 | CTNNB1_ROI_8 |
| 10 | 42924641 | minus | 977 | 978 | 979 | 980 | RET_ROI_6 |
| 1 | 74473574 | plus | 981 | 982 | 983 | 984 | TNNI3K_ROI_1 |
| 17 | 26681290 | plus | 985 | 986 | 987 | 988 | NF1_ROI_39 |
| 5 | 14560333 | minus | 989 | 990 | 991 | 992 | TRIO_ROI_55 |
| 8 | 113385976 | plus | 993 | 994 | 995 | 996 | CSMD3_ROI_53 |
| 8 | 113940635 | minus | 997 | 998 | 999 | 1000 | CSMD3_ROI_12 |
| 10 | 42943416 | plus | 1001 | 1002 | 1003 | 1004 | RET_ROI_20 |
| 20 | 35463459 | minus | 1005 | 1006 | 1007 | 1008 | SRC_ROI_8 |
| 1 | 64288796 | plus | 1009 | 1010 | 1011 | 1012 | ROR1_ROI_4 |
| 11 | 107646851 | plus | 1013 | 1014 | 1015 | 1016 | ATM_ROI_17 |
| 6 | 41664210 | plus | 1017 | 1018 | 1019 | 1020 | FOXP4_ROI_8 |
| 12 | 77108036 | plus | 1021 | 1022 | 1023 | 1024 | NAV3_ROI_33 |
| 16 | 23629030 | minus | 1025 | 1026 | 1027 | 1028 | ERN2_ROI_4 |
| 11 | 107695741 | plus | 1029 | 1030 | 1031 | 1032 | ATM_ROI_41 |
| 7 | 98316772 | minus | 1033 | 1034 | 1035 | 1036 | TRRAP_ROI_1 |
| 22 | 28381453 | plus | 1037 | 1038 | 1039 | 1040 | NF2_ROI_6 |
| 1 | 6114357 | minus | 1041 | 1042 | 1043 | 1044 | CHD5_ROI_18 |
| 18 | 49177776 | minus | 1045 | 1046 | 1047 | 1048 | DCC_ROI_18 |
| 20 | 35463269 | plus | 1049 | 1050 | 1051 | 1052 | SRC_ROI_8 |
| 2 | 80728470 | minus | 1053 | 1054 | 1055 | 1056 | CTNNA2_ROI_17 |
| 7 | 151499189 | minus | 1057 | 1058 | 1059 | 1060 | MLL3_ROI_39 |
| 6 | 3023129 | minus | 1061 | 1062 | 1063 | 1064 | RIPK1_ROI_2 |
| 3 | 41241299 | plus | 1065 | 1066 | 1067 | 1068 | CTNNB1_ROI_3 |
| 19 | 10324452 | plus | 1069 | 1070 | 1071 | 1072 | TYK2_ROI_15 |
| 1 | 11097989 | plus | 1073 | 1074 | 1075 | 1076 | FRAP1_ROI_48 |
| 10 | 55391619 | minus | 1077 | 1078 | 1079 | 1080 | PCDH15_ROI_21 |
| 6 | 69842612 | minus | 1081 | 1082 | 1083 | 1084 | BAI3_ROI_15 |
| 17 | 26686136 | minus | 1085 | 1086 | 1087 | 1088 | NF1_ROI_40 |
| 19 | 1014393 | plus | 1089 | 1090 | 1091 | 1092 | ABCA7_ROI_31 |
| 12 | 76886518 | minus | 1093 | 1094 | 1095 | 1096 | NAV3_ROI_5 |
| 4 | 107376846 | plus | 1097 | 1098 | 1099 | 1100 | MGC16169_ROI_11 |
| 7 | 140147531 | plus | 1101 | 1102 | 1103 | 1104 | BRAF_ROI_6 |
| 23 | 69585338 | plus | 1105 | 1106 | 1107 | 1108 | DLG3_ROI_2 |
| 20 | 61808645 | plus | 1109 | 1110 | 1111 | 1112 | ARFRP1_ROI_1 |
| 20 | 29596459 | minus | 1113 | 1114 | 1115 | 1116 | HM13_ROI_4 |
| 13 | 31811217 | plus | 1117 | 1118 | 1119 | 1120 | BRCA2_ROI_9 |
| 17 | 26708193 | minus | 1121 | 1122 | 1123 | 1124 | NF1_ROI_53 |
| 1 | 64397102 | plus | 1125 | 1126 | 1127 | 1128 | ROR1_ROI_8 |
| 18 | 20923277 | plus | 1129 | 1130 | 1131 | 1132 | ZNF521_ROI_6 |
| 12 | 130168789 | minus | 1133 | 1134 | 1135 | 1136 | GPR133_ROI_18 |
| 18 | 46858794 | minus | 1137 | 1138 | 1139 | 1140 | SMAD4_ROI_10 |
| 7 | 148160509 | plus | 1141 | 1142 | 1143 | 1144 | EZH2_ROI_3 |
| 19 | 10334291 | minus | 1145 | 1146 | 1147 | 1148 | TYK2_ROI_6 |
| 12 | 130186385 | plus | 1149 | 1150 | 1151 | 1152 | GPR133_ROI_21 |
| 22 | 28362823 | minus | 1153 | 1154 | 1155 | 1156 | NF2_ROI_2 |
| 15 | 20479420 | plus | 1157 | 1158 | 1159 | 1160 | CYFIP1_ROI_2 |
| 7 | 151511132 | minus | 1161 | 1162 | 1163 | 1164 | MLL3_ROI_34 |
| 1 | 11230696 | minus | 1165 | 1166 | 1167 | 1168 | FRAP1_ROI_6 |
| 8 | 113306026 | plus | 1169 | 1170 | 1171 | 1172 | CSMD3_ROI_72 |
| 12 | 119918298 | plus | 1173 | 1174 | 1175 | 1176 | HNF1A_ROI_5 |
| 13 | 31810046 | minus | 1177 | 1178 | 1179 | 1180 | BRCA2_ROI_9 |
| 5 | 24527639 | minus | 1181 | 1182 | 1183 | 1184 | CDH10_ROI_10 |
| 17 | 26700268 | minus | 1185 | 1186 | 1187 | 1188 | NF1_ROI_49 |
| 17 | 26709723 | minus | 1189 | 1190 | 1191 | 1192 | NF1_ROI_55 |
| 12 | 130187321 | plus | 1193 | 1194 | 1195 | 1196 | GPR133_ROI_22 |
| 10 | 42921680 | plus | 1197 | 1198 | 1199 | 1200 | RET_ROI_5 |
| 7 | 98440554 | minus | 1201 | 1202 | 1203 | 1204 | TRRAP_ROI_63 |
| 16 | 67404719 | minus | 1205 | 1206 | 1207 | 1208 | CDH1_ROI_9 |
| 12 | 130022035 | minus | 1209 | 1210 | 1211 | 1212 | GPR133_ROI_3 |
| 23 | 85655898 | minus | 1213 | 1214 | 1215 | 1216 | DACH2_ROI_3 |
| 13 | 31791419 | minus | 1217 | 1218 | 1219 | 1220 | BRCA2_ROI_2 |
| 1 | 74607813 | minus | 1221 | 1222 | 1223 | 1224 | TNNI3K_ROI_14 |
| 15 | 20544316 | plus | 1225 | 1226 | 1227 | 1228 | CYFIP1_ROI_23 |
| 19 | 11029801 | plus | 1229 | 1230 | 1231 | 1232 | SMARCA4_ROI_30 |
| 1 | 115052754 | minus | 1233 | 1234 | 1235 | 1236 | NRAS_ROI_4 |
| 3 | 132363792 | plus | 1237 | 1238 | 1239 | 1240 | NEK11_ROI_8 |
| 18 | 49267015 | plus | 1241 | 1242 | 1243 | 1244 | DCC_ROI_26 |
| 1 | 11109744 | minus | 1245 | 1246 | 1247 | 1248 | FRAP1_ROI_42 |
| 17 | 26506977 | plus | 1249 | 1250 | 1251 | 1252 | NF1_ROI_2 |
| 5 | 112203353 | minus | 1253 | 1254 | 1255 | 1256 | APC_ROI_15 |
| 11 | 107707231 | plus | 1257 | 1258 | 1259 | 1260 | ATM_ROI_48 |
| 7 | 98417178 | plus | 1261 | 1262 | 1263 | 1264 | TRRAP_ROI_53 |
| 18 | 32515347 | minus | 1265 | 1266 | 1267 | 1268 | FHOD3_ROI_12 |
| 11 | 107695930 | minus | 1269 | 1270 | 1271 | 1272 | ATM_ROI_41 |
| 19 | 10990654 | minus | 1273 | 1274 | 1275 | 1276 | SMARCA4_ROI_16 |
| 2 | 179356542 | plus | 1277 | 1278 | 1279 | 1280 | TTN_ROI_15 |
| 1 | 11239670 | plus | 1281 | 1282 | 1283 | 1284 | FRAP1_ROI_3 |
| 7 | 140100425 | plus | 1285 | 1286 | 1287 | 1288 | BRAF_ROI_14 |
| 18 | 57318669 | minus | 1289 | 1290 | 1291 | 1292 | CDH20_ROI_3 |
| 20 | 29596261 | plus | 1293 | 1294 | 1295 | 1296 | HM13_ROI_4 |
| 16 | 86302192 | plus | 1297 | 1298 | 1299 | 1300 | KLHDC4_ROI_9 |
| 1 | 11127352 | minus | 1301 | 1302 | 1303 | 1304 | FRAP1_ROI_32 |
| 15 | 20551387 | plus | 1305 | 1306 | 1307 | 1308 | CYFIP1_ROI_27 |
| 7 | 81450528 | minus | 1309 | 1310 | 1311 | 1312 | CACNA2D1_ROI_23 |
| 15 | 20496331 | plus | 1313 | 1314 | 1315 | 1316 | CYFIP1_ROI_9 |
| 7 | 81531406 | plus | 1317 | 1318 | 1319 | 1320 | CACNA2D1_ROI_9 |
| 11 | 69165113 | plus | 1321 | 1322 | 1323 | 1324 | CCND1_ROI_1 |
| 2 | 179377566 | minus | 1325 | 1326 | 1327 | 1328 | TTN_ROI_1 |
| 7 | 113305967 | plus | 1329 | 1330 | 1331 | 1332 | PPP1R3A_ROI_3 |
| 1 | 115060096 | plus | 1333 | 1334 | 1335 | 1336 | NRAS_ROI_1 |
| 12 | 119915696 | plus | 1337 | 1338 | 1339 | 1340 | HNF1A_ROI_3 |
| 2 | 80670072 | minus | 1341 | 1342 | 1343 | 1344 | CTNNA2_ROI_14 |
| 7 | 148175057 | plus | 1345 | 1346 | 1347 | 1348 | EZH2_ROI_1 |
| 22 | 28384028 | plus | 1349 | 1350 | 1351 | 1352 | NF2_ROI_7 |
| 11 | 85639014 | minus | 1353 | 1354 | 1355 | 1356 | EED_ROI_2 |
| 5 | 14534677 | minus | 1357 | 1358 | 1359 | 1360 | TRIO_ROI_44 |
| 3 | 132551250 | minus | 1361 | 1362 | 1363 | 1364 | NEK11_ROI_15 |
| 7 | 148154607 | minus | 1365 | 1366 | 1367 | 1368 | EZH2_ROI_7 |
| 15 | 20551586 | minus | 1369 | 1370 | 1371 | 1372 | CYFIP1_ROI_27 |
| 19 | 7882884 | plus | 1373 | 1374 | 1375 | 1376 | MAP2K7_ROI_8 |
| 2 | 179350505 | minus | 1377 | 1378 | 1379 | 1380 | TTN_ROI_24 |
| 7 | 151510170 | minus | 1381 | 1382 | 1383 | 1384 | MLL3_ROI_35 |
| 15 | 20477147 | minus | 1385 | 1386 | 1387 | 1388 | CYFIP1_ROI_1 |
| 8 | 37810214 | plus | 1389 | 1390 | 1391 | 1392 | GPR124_ROI_10 |
| 3 | 89544938 | minus | 1393 | 1394 | 1395 | 1396 | EPHA3_ROI_10 |
| 18 | 32428598 | plus | 1397 | 1398 | 1399 | 1400 | FHOD3_ROI_7 |
| 4 | 1773252 | minus | 1401 | 1402 | 1403 | 1404 | FGFR3_ROI_4 |
| 19 | 10991137 | plus | 1405 | 1406 | 1407 | 1408 | SMARCA4_ROI_17 |
| 5 | 14534193 | plus | 1409 | 1410 | 1411 | 1412 | TRIO_ROI_43 |
| 4 | 1777921 | plus | 1413 | 1414 | 1415 | 1416 | FGFR3_ROI_10 |
| 4 | 107435699 | minus | 1417 | 1418 | 1419 | 1420 | MGC16169_ROI_2 |
| 9 | 21958177 | plus | 1421 | 1422 | 1423 | 1424 | CDKN2A_ROI_4 |
| 8 | 113315829 | minus | 1425 | 1426 | 1427 | 1428 | CSMD3_ROI_69 |
| 3 | 36755101 | minus | 1429 | 1430 | 1431 | 1432 | DCLK3_ROI_1 |
| 14 | 102539967 | plus | 1433 | 1434 | 1435 | 1436 | CDC42BPB_ROI_4 |
| 18 | 49102472 | minus | 1437 | 1438 | 1439 | 1440 | DCC_ROI_14 |
| 11 | 64330363 | minus | 1441 | 1442 | 1443 | 1444 | MEN1_ROI_5 |
| 1 | 74606037 | minus | 1445 | 1446 | 1447 | 1448 | TNNI3K_ROI_12 |
| 1 | 115052549 | plus | 1449 | 1450 | 1451 | 1452 | NRAS_ROI_4 |
| 15 | 20520454 | plus | 1453 | 1454 | 1455 | 1456 | CYFIP1_ROI_19 |
| 10 | 42926511 | plus | 1457 | 1458 | 1459 | 1460 | RET_ROI_7 |
| 19 | 14936119 | minus | 1461 | 1462 | 1463 | 1464 | SLC1A6_ROI_4 |
| 15 | 20498473 | minus | 1465 | 1466 | 1467 | 1468 | CYFIP1_ROI_10 |
| 5 | 112205714 | minus | 1469 | 1470 | 1471 | 1472 | APC_ROI_15 |
| 18 | 32552476 | minus | 1473 | 1474 | 1475 | 1476 | FHOD3_ROI_16 |
| 19 | 14940264 | minus | 1477 | 1478 | 1479 | 1480 | SLC1A6_ROI_3 |
| 15 | 20554187 | plus | 1481 | 1482 | 1483 | 1484 | CYFIP1_ROI_28 |
| 19 | 14943631 | minus | 1485 | 1486 | 1487 | 1488 | SLC1A6_ROI_2 |
| 7 | 98393449 | minus | 1489 | 1490 | 1491 | 1492 | TRRAP_ROI_38 |
| 1 | 11115766 | minus | 1493 | 1494 | 1495 | 1496 | FRAP1_ROI_35 |
| 2 | 179340824 | minus | 1497 | 1498 | 1499 | 1500 | TTN_ROI_33 |
| 4 | 107335174 | plus | 1501 | 1502 | 1503 | 1504 | MGC16169_ROI_18 |
| 8 | 113315623 | minus | 1505 | 1506 | 1507 | 1508 | CSMD3_ROI_69 |
| 18 | 51168953 | plus | 1509 | 1510 | 1511 | 1512 | TCF4_ROI_6 |
| 2 | 197972874 | plus | 1513 | 1514 | 1515 | 1516 | SF3B1_ROI_17 |
| 1 | 6104065 | minus | 1517 | 1518 | 1519 | 1520 | CHD5_ROI_29 |
| 3 | 89342303 | minus | 1521 | 1522 | 1523 | 1524 | EPHA3_ROI_3 |
| 18 | 41925496 | plus | 1525 | 1526 | 1527 | 1528 | ATP5A1_ROI_3 |
| 2 | 1467225 | plus | 1529 | 1530 | 1531 | 1532 | TPO_ROI_8 |
| 17 | 35137269 | minus | 1533 | 1534 | 1535 | 1536 | ERBB2_ROI_23 |
| 1 | 150591471 | minus | 1537 | 1538 | 1539 | 1540 | FLG2_ROI_2 |
| 19 | 10333117 | minus | 1541 | 1542 | 1543 | 1544 | TYK2_ROI_8 |
| 1 | 74608410 | plus | 1545 | 1546 | 1547 | 1548 | TNNI3K_ROI_15 |
| 14 | 102486426 | plus | 1549 | 1550 | 1551 | 1552 | CDC42BPB_ROI_24 |
| 1 | 11127142 | plus | 1553 | 1554 | 1555 | 1556 | FRAP1_ROI_32 |
| 12 | 76924180 | plus | 1557 | 1558 | 1559 | 1560 | NAV3_ROI_8 |
| 6 | 3022903 | minus | 1561 | 1562 | 1563 | 1564 | RIPK1_ROI_2 |
| 22 | 28380595 | plus | 1565 | 1566 | 1567 | 1568 | NF2_ROI_5 |
| 1 | 11090085 | minus | 1569 | 1570 | 1571 | 1572 | FRAP1_ROI_55 |
| 6 | 80777822 | minus | 1573 | 1574 | 1575 | 1576 | TTK_ROI_5 |
| 7 | 151467054 | plus | 1577 | 1578 | 1579 | 1580 | MLL3_ROI_56 |
| 7 | 98388576 | plus | 1581 | 1582 | 1583 | 1584 | TRRAP_ROI_35 |
| 19 | 14943419 | plus | 1585 | 1586 | 1587 | 1588 | SLC1A6_ROI_2 |
| 13 | 31818814 | plus | 1589 | 1590 | 1591 | 1592 | BRCA2_ROI_11 |
| 2 | 79954787 | minus | 1593 | 1594 | 1595 | 1596 | CTNNA2_ROI_5 |
| 7 | 98316560 | plus | 1597 | 1598 | 1599 | 1600 | TRRAP_ROI_1 |
| 18 | 43650694 | plus | 1601 | 1602 | 1603 | 1604 | SMAD2_ROI_2 |
| 10 | 55368431 | plus | 1605 | 1606 | 1607 | 1608 | PCDH15_ROI_24 |
| 22 | 28408859 | plus | 1609 | 1610 | 1611 | 1612 | NF2_ROI_16 |
| 2 | 197973321 | minus | 1613 | 1614 | 1615 | 1616 | SF3B1_ROI_17 |
| 19 | 11002256 | plus | 1617 | 1618 | 1619 | 1620 | SMARCA4_ROI_24 |
| 7 | 151477108 | minus | 1621 | 1622 | 1623 | 1624 | MLL3_ROI_51 |
| 17 | 10381125 | plus | 1625 | 1626 | 1627 | 1628 | MYH2_ROI_10 |
| 17 | 26583963 | minus | 1629 | 1630 | 1631 | 1632 | NF1_ROI_26 |
| 8 | 113416808 | minus | 1633 | 1634 | 1635 | 1636 | CSMD3_ROI_46 |
| 1 | 173573323 | minus | 1637 | 1638 | 1639 | 1640 | TNR_ROI_17 |
| 1 | 11225881 | minus | 1641 | 1642 | 1643 | 1644 | FRAP1_ROI_7 |
| 8 | 114036082 | minus | 1645 | 1646 | 1647 | 1648 | CSMD3_ROI_9 |
| 17 | 26711481 | plus | 1649 | 1650 | 1651 | 1652 | NF1_ROI_57 |
| 2 | 47871703 | minus | 1653 | 1654 | 1655 | 1656 | MSH6_ROI_2 |
| 8 | 113726546 | minus | 1657 | 1658 | 1659 | 1660 | CSMD3_ROI_21 |
| 1 | 11236444 | minus | 1661 | 1662 | 1663 | 1664 | FRAP1_ROI_5 |
| 5 | 24573476 | minus | 1665 | 1666 | 1667 | 1668 | CDH10_ROI_2 |
| 12 | 76939708 | minus | 1669 | 1670 | 1671 | 1672 | NAV3_ROI_9 |
| 17 | 27344847 | plus | 1673 | 1674 | 1675 | 1676 | SUZ12_ROI_11 |
| 8 | 114100420 | minus | 1677 | 1678 | 1679 | 1680 | CSMD3_ROI_7 |
| 7 | 148175258 | minus | 1681 | 1682 | 1683 | 1684 | EZH2_ROI_1 |
| 2 | 197969232 | minus | 1685 | 1686 | 1687 | 1688 | SF3B1_ROI_20 |
| 11 | 107707428 | minus | 1689 | 1690 | 1691 | 1692 | ATM_ROI_48 |
| 3 | 10158382 | plus | 1693 | 1694 | 1695 | 1696 | VHL_ROI_1 |
| 7 | 55236476 | minus | 1697 | 1698 | 1699 | 1700 | EGFR_ROI_26 |
| 8 | 37807513 | minus | 1701 | 1702 | 1703 | 1704 | GPR124_ROI_7 |
| 7 | 98388926 | minus | 1705 | 1706 | 1707 | 1708 | TRRAP_ROI_35 |
| 6 | 69722583 | minus | 1709 | 1710 | 1711 | 1712 | BAI3_ROI_5 |
| 3 | 180404835 | plus | 1713 | 1714 | 1715 | 1716 | PIK3CA_ROI_5 |
| 19 | 997079 | plus | 1717 | 1718 | 1719 | 1720 | ABCA7_ROI_9 |
| 6 | 3049308 | plus | 1721 | 1722 | 1723 | 1724 | RIPK1_ROI_7 |
| 17 | 26707974 | plus | 1725 | 1726 | 1727 | 1728 | NF1_ROI_53 |
| 19 | 7880798 | plus | 1729 | 1730 | 1731 | 1732 | MAP2K7_ROI_3 |
| 1 | 6138197 | minus | 1733 | 1734 | 1735 | 1736 | CHD5_ROI_4 |
| 12 | 77107745 | plus | 1737 | 1738 | 1739 | 1740 | NAV3_ROI_33 |
| 2 | 1405674 | plus | 1741 | 1742 | 1743 | 1744 | TPO_ROI_2 |
| 17 | 26586978 | minus | 1745 | 1746 | 1747 | 1748 | NF1_ROI_29 |
| 14 | 102479831 | plus | 1749 | 1750 | 1751 | 1752 | CDC42BPB_ROI_29 |
| 5 | 112179021 | minus | 1753 | 1754 | 1755 | 1756 | APC_ROI_8 |
| 1 | 11099597 | plus | 1757 | 1758 | 1759 | 1760 | FRAP1_ROI_47 |
| 19 | 14928434 | minus | 1761 | 1762 | 1763 | 1764 | SLC1A6_ROI_6 |
| 8 | 114057092 | plus | 1765 | 1766 | 1767 | 1768 | CSMD3_ROI_8 |
| 7 | 98347703 | minus | 1769 | 1770 | 1771 | 1772 | TRRAP_ROI_16 |
| 17 | 35129416 | plus | 1773 | 1774 | 1775 | 1776 | ERBB2_ROI_14 |
| 18 | 51088122 | minus | 1777 | 1778 | 1779 | 1780 | TCF4_ROI_10 |
| 7 | 98336132 | plus | 1781 | 1782 | 1783 | 1784 | TRRAP_ROI_10 |
| 18 | 48843523 | plus | 1785 | 1786 | 1787 | 1788 | DCC_ROI_6 |
| 4 | 107391014 | minus | 1789 | 1790 | 1791 | 1792 | MGC16169_ROI_4 |
| 15 | 20496531 | minus | 1793 | 1794 | 1795 | 1796 | CYFIP1_ROI_9 |
| 20 | 29600343 | plus | 1797 | 1798 | 1799 | 1800 | HM13_ROI_5 |
| 19 | 35004385 | minus | 1801 | 1802 | 1803 | 1804 | CCNE1_ROI_7 |
| 18 | 41921923 | plus | 1805 | 1806 | 1807 | 1808 | ATP5A1_ROI_5 |
| 7 | 81437897 | minus | 1809 | 1810 | 1811 | 1812 | CACNA2D1_ROI_27 |
| 8 | 113416584 | plus | 1813 | 1814 | 1815 | 1816 | CSMD3_ROI_46 |
| 18 | 41928966 | plus | 1817 | 1818 | 1819 | 1820 | ATP5A1_ROI_2 |
| 7 | 148160703 | minus | 1821 | 1822 | 1823 | 1824 | EZH2_ROI_3 |
| 18 | 20923470 | minus | 1825 | 1826 | 1827 | 1828 | ZNF521_ROI_6 |
| 6 | 41665436 | plus | 1829 | 1830 | 1831 | 1832 | FOXP4_ROI_9 |
| 7 | 151495042 | minus | 1833 | 1834 | 1835 | 1836 | MLL3_ROI_41 |
| 7 | 98368670 | plus | 1837 | 1838 | 1839 | 1840 | TRRAP_ROI_25 |
| 2 | 79938497 | plus | 1841 | 1842 | 1843 | 1844 | CTNNA2_ROI_3 |
| 18 | 48959180 | plus | 1845 | 1846 | 1847 | 1848 | DCC_ROI_9 |
| 6 | 3030568 | minus | 1849 | 1850 | 1851 | 1852 | RIPK1_ROI_5 |
| 7 | 98370988 | plus | 1853 | 1854 | 1855 | 1856 | TRRAP_ROI_26 |
| 1 | 64247415 | plus | 1857 | 1858 | 1859 | 1860 | ROR1_ROI_2 |
| 2 | 79824871 | plus | 1861 | 1862 | 1863 | 1864 | CTNNA2_ROI_2 |
| 7 | 128630340 | minus | 1865 | 1866 | 1867 | 1868 | SMO_ROI_2 |
| 23 | 85856143 | minus | 1869 | 1870 | 1871 | 1872 | DACH2_ROI_6 |
| 3 | 49873941 | minus | 1873 | 1874 | 1875 | 1876 | CAMKV_ROI_4 |
| 1 | 11239427 | plus | 1877 | 1878 | 1879 | 1880 | FRAP1_ROI_3 |
| 7 | 81479421 | minus | 1881 | 1882 | 1883 | 1884 | CACNA2D1_ROI_15 |
| 8 | 113417907 | plus | 1885 | 1886 | 1887 | 1888 | CSMD3_ROI_45 |
| 17 | 11983731 | plus | 1889 | 1890 | 1891 | 1892 | MAP2K4_ROI_10 |
| 23 | 69631833 | plus | 1893 | 1894 | 1895 | 1896 | DLG3_ROI_15 |
| 23 | 70504023 | plus | 1897 | 1898 | 1899 | 1900 | TAF1_ROI_2 |
| 7 | 98353085 | minus | 1901 | 1902 | 1903 | 1904 | TRRAP_ROI_18 |
| 3 | 180410107 | minus | 1905 | 1906 | 1907 | 1908 | PIK3CA_ROI_6 |
| 8 | 114359847 | plus | 1909 | 1910 | 1911 | 1912 | CSMD3_ROI_4 |
| 1 | 11112232 | plus | 1913 | 1914 | 1915 | 1916 | FRAP1_ROI_37 |
| 8 | 113654756 | plus | 1917 | 1918 | 1919 | 1920 | CSMD3_ROI_25 |
| 2 | 79954560 | plus | 1921 | 1922 | 1923 | 1924 | CTNNA2_ROI_5 |
| 5 | 14427278 | minus | 1925 | 1926 | 1927 | 1928 | TRIO_ROI_19 |
| 6 | 69710445 | minus | 1929 | 1930 | 1931 | 1932 | BAI3_ROI_4 |
| 7 | 81449768 | plus | 1933 | 1934 | 1935 | 1936 | CACNA2D1_ROI_24 |
| 11 | 107628773 | minus | 1937 | 1938 | 1939 | 1940 | ATM_ROI_10 |
| 7 | 140124267 | minus | 1941 | 1942 | 1943 | 1944 | BRAF_ROI_12 |
| 10 | 55368644 | minus | 1945 | 1946 | 1947 | 1948 | PCDH15_ROI_24 |
| 2 | 197971473 | minus | 1949 | 1950 | 1951 | 1952 | SF3B1_ROI_18 |
| 12 | 50663900 | plus | 1953 | 1954 | 1955 | 1956 | ACVR1B_ROI_5 |
| 10 | 42920569 | minus | 1957 | 1958 | 1959 | 1960 | RET_ROI_4 |
| 12 | 25271285 | plus | 1961 | 1962 | 1963 | 1964 | KRAS_ROI_2 |
| 3 | 132335313 | plus | 1965 | 1966 | 1967 | 1968 | NEK11_ROI_5 |
| 4 | 107392376 | minus | 1969 | 1970 | 1971 | 1972 | MGC16169_ROI_3 |
| 5 | 112191375 | plus | 1973 | 1974 | 1975 | 1976 | APC_ROI_12 |
| 6 | 70005740 | minus | 1977 | 1978 | 1979 | 1980 | BAI3_ROI_18 |
| 18 | 48959405 | minus | 1981 | 1982 | 1983 | 1984 | DCC_ROI_9 |
| 2 | 179348985 | minus | 1985 | 1986 | 1987 | 1988 | TTN_ROI_25 |
| 3 | 41240871 | plus | 1989 | 1990 | 1991 | 1992 | CTNNB1_ROI_2 |
| 7 | 151523874 | plus | 1993 | 1994 | 1995 | 1996 | MLL3_ROI_28 |
| 18 | 46847475 | minus | 1997 | 1998 | 1999 | 2000 | SMAD4_ROI_8 |
| 17 | 26691499 | plus | 2001 | 2002 | 2003 | 2004 | NF1_ROI_47 |
| 13 | 31811428 | plus | 2005 | 2006 | 2007 | 2008 | BRCA2_ROI_9 |
| 12 | 77118234 | plus | 2009 | 2010 | 2011 | 2012 | NAV3_ROI_37 |
| 10 | 55370660 | minus | 2013 | 2014 | 2015 | 2016 | PCDH15_ROI_23 |
| 22 | 28362590 | plus | 2017 | 2018 | 2019 | 2020 | NF2_ROI_2 |
| 11 | 64330130 | plus | 2021 | 2022 | 2023 | 2024 | MEN1_ROI_5 |
| 15 | 20492205 | minus | 2025 | 2026 | 2027 | 2028 | CYFIP1_ROI_8 |
| 1 | 11238642 | minus | 2029 | 2030 | 2031 | 2032 | FRAP1_ROI_4 |
| 7 | 128632130 | plus | 2033 | 2034 | 2035 | 2036 | SMO_ROI_3 |
| 18 | 21059225 | minus | 2037 | 2038 | 2039 | 2040 | ZNF521_ROI_3 |
| 9 | 93533046 | minus | 2041 | 2042 | 2043 | 2044 | ROR2_ROI_7 |
| 23 | 47307518 | plus | 2045 | 2046 | 2047 | 2048 | ARAF_ROI_2 |
| 7 | 81451882 | minus | 2049 | 2050 | 2051 | 2052 | CACNA2D1_ROI_22 |
| 18 | 48843745 | minus | 2053 | 2054 | 2055 | 2056 | DCC_ROI_6 |
| 20 | 61803515 | minus | 2057 | 2058 | 2059 | 2060 | ARFRP1_ROI_5 |
| 6 | 80804253 | plus | 2061 | 2062 | 2063 | 2064 | TTK_ROI_16 |
| 2 | 80473697 | plus | 2065 | 2066 | 2067 | 2068 | CTNNA2_ROI_7 |
| 3 | 41252256 | minus | 2069 | 2070 | 2071 | 2072 | CTNNB1_ROI_8 |
| 23 | 69637323 | plus | 2073 | 2074 | 2075 | 2076 | DLG3_ROI_21 |
| 18 | 21059954 | minus | 2077 | 2078 | 2079 | 2080 | ZNF521_ROI_3 |
| 1 | 173602817 | plus | 2081 | 2082 | 2083 | 2084 | TNR_ROI_8 |
| 8 | 113940400 | plus | 2085 | 2086 | 2087 | 2088 | CSMD3_ROI_12 |
| 10 | 42920256 | plus | 2089 | 2090 | 2091 | 2092 | RET_ROI_4 |
| 5 | 112144236 | plus | 2093 | 2094 | 2095 | 2096 | APC_ROI_5 |
| 10 | 89707440 | plus | 2097 | 2098 | 2099 | 2100 | PTEN_ROI_7 |
| 18 | 41931986 | plus | 2101 | 2102 | 2103 | 2104 | ATP5A1_ROI_1 |
| 2 | 179346305 | minus | 2105 | 2106 | 2107 | 2108 | TTN_ROI_28 |
| 11 | 107708733 | minus | 2109 | 2110 | 2111 | 2112 | ATM_ROI_50 |
| 23 | 85290131 | plus | 2113 | 2114 | 2115 | 2116 | DACH2_ROI_1 |
| 3 | 180401622 | plus | 2117 | 2118 | 2119 | 2120 | PIK3CA_ROI_3 |
| 20 | 35455582 | plus | 2121 | 2122 | 2123 | 2124 | SRC_ROI_3 |
| 18 | 32576663 | minus | 2125 | 2126 | 2127 | 2128 | FHOD3_ROI_19 |
| 1 | 11198675 | minus | 2129 | 2130 | 2131 | 2132 | FRAP1_ROI_18 |
| 8 | 37818947 | minus | 2133 | 2134 | 2135 | 2136 | GPR124_ROI_19 |
| 7 | 98412348 | plus | 2137 | 2138 | 2139 | 2140 | TRRAP_ROI_50 |
| 11 | 64330909 | plus | 2141 | 2142 | 2143 | 2144 | MEN1_ROI_4 |
| 1 | 74677809 | minus | 2145 | 2146 | 2147 | 2148 | TNNI3K_ROI_18 |
| 7 | 148137330 | minus | 2149 | 2150 | 2151 | 2152 | EZH2_ROI_17 |
| 7 | 55236884 | minus | 2153 | 2154 | 2155 | 2156 | EGFR_ROI_27 |
| 1 | 173560193 | minus | 2157 | 2158 | 2159 | 2160 | TNR_ROI_20 |
| 12 | 130041431 | minus | 2161 | 2162 | 2163 | 2164 | GPR133_ROI_6 |
| 23 | 70246761 | minus | 2165 | 2166 | 2167 | 2168 | IL2RG_ROI_4 |
| 16 | 23614616 | minus | 2169 | 2170 | 2171 | 2172 | ERN2_ROI_13 |
| 18 | 49267211 | minus | 2173 | 2174 | 2175 | 2176 | DCC_ROI_26 |
| 1 | 11111110 | minus | 2177 | 2178 | 2179 | 2180 | FRAP1_ROI_39 |
| 18 | 46847237 | plus | 2181 | 2182 | 2183 | 2184 | SMAD4_ROI_8 |
| 16 | 86321665 | minus | 2185 | 2186 | 2187 | 2188 | KLHDC4_ROI_6 |
| 1 | 74591546 | minus | 2189 | 2190 | 2191 | 2192 | TNNI3K_ROI_9 |
| 2 | 179355950 | minus | 2193 | 2194 | 2195 | 2196 | TTN_ROI_16 |
| 6 | 80806482 | plus | 2197 | 2198 | 2199 | 2200 | TTK_ROI_18 |
| 3 | 132366810 | plus | 2201 | 2202 | 2203 | 2204 | NEK11_ROI_9 |
| 12 | 76886280 | plus | 2205 | 2206 | 2207 | 2208 | NAV3_ROI_5 |
| 1 | 11095346 | plus | 2209 | 2210 | 2211 | 2212 | FRAP1_ROI_51 |
| 2 | 1436343 | plus | 2213 | 2214 | 2215 | 2216 | TPO_ROI_5 |
| 3 | 41253051 | plus | 2217 | 2218 | 2219 | 2220 | CTNNB1_ROI_9 |
| 2 | 1476451 | plus | 2221 | 2222 | 2223 | 2224 | TPO_ROI_10 |
| 17 | 11954366 | plus | 2225 | 2226 | 2227 | 2228 | MAP2K4_ROI_6 |
| 8 | 113310011 | plus | 2229 | 2230 | 2231 | 2232 | CSMD3_ROI_71 |
| 1 | 11109504 | plus | 2233 | 2234 | 2235 | 2236 | FRAP1_ROI_42 |
| 1 | 74605378 | plus | 2237 | 2238 | 2239 | 2240 | TNNI3K_ROI_11 |
| 23 | 70559641 | plus | 2241 | 2242 | 2243 | 2244 | TAF1_ROI_29 |
| 18 | 32335743 | plus | 2245 | 2246 | 2247 | 2248 | FHOD3_ROI_4 |
| 23 | 70247537 | minus | 2249 | 2250 | 2251 | 2252 | IL2RG_ROI_2 |
| 12 | 50664129 | minus | 2253 | 2254 | 2255 | 2256 | ACVR1B_ROI_5 |
| 1 | 6088892 | plus | 2257 | 2258 | 2259 | 2260 | CHD5_ROI_37 |
| 1 | 64378230 | plus | 2261 | 2262 | 2263 | 2264 | ROR1_ROI_6 |
| 3 | 89539856 | plus | 2265 | 2266 | 2267 | 2268 | EPHA3_ROI_9 |
| 10 | 89643757 | minus | 2269 | 2270 | 2271 | 2272 | PTEN_ROI_2 |
| 3 | 180410518 | plus | 2273 | 2274 | 2275 | 2276 | PIK3CA_ROI_7 |
| 12 | 50673985 | plus | 2277 | 2278 | 2279 | 2280 | ACVR1B_ROI_9 |
| 1 | 11193308 | plus | 2281 | 2282 | 2283 | 2284 | FRAP1_ROI_22 |
| 2 | 179340581 | plus | 2285 | 2286 | 2287 | 2288 | TTN_ROI_33 |
| 1 | 74487581 | plus | 2289 | 2290 | 2291 | 2292 | TNNI3K_ROI_3 |
| 1 | 56934290 | minus | 2293 | 2294 | 2295 | 2296 | PRKAA2_ROI_6 |
| 2 | 197973813 | minus | 2297 | 2298 | 2299 | 2300 | SF3B1_ROI_16 |
| 17 | 26688932 | minus | 2301 | 2302 | 2303 | 2304 | NF1_ROI_44 |
| 19 | 1005248 | minus | 2305 | 2306 | 2307 | 2308 | ABCA7_ROI_20 |
| 19 | 34995286 | plus | 2309 | 2310 | 2311 | 2312 | CCNE1_ROI_2 |
| 2 | 148400008 | minus | 2313 | 2314 | 2315 | 2316 | ACVR2A_ROI_10 |
| 18 | 49171873 | plus | 2317 | 2318 | 2319 | 2320 | DCC_ROI_17 |
| 7 | 55178342 | plus | 2321 | 2322 | 2323 | 2324 | EGFR_ROI_3 |
| 7 | 98414370 | minus | 2325 | 2326 | 2327 | 2328 | TRRAP_ROI_52 |
| 15 | 20479700 | plus | 2329 | 2330 | 2331 | 2332 | CYFIP1_ROI_3 |
| 23 | 85290367 | minus | 2333 | 2334 | 2335 | 2336 | DACH2_ROI_1 |
| 23 | 69586693 | plus | 2337 | 2338 | 2339 | 2340 | DLG3_ROI_5 |
| 8 | 113881417 | plus | 2341 | 2342 | 2343 | 2344 | CSMD3_ROI_14 |
| 2 | 106789743 | minus | 2345 | 2346 | 2347 | 2348 | ST6GAL2_ROI_5 |
| 18 | 19028260 | plus | 2349 | 2350 | 2351 | 2352 | CABLES1_ROI_4 |
| 7 | 148137084 | plus | 2353 | 2354 | 2355 | 2356 | EZH2_ROI_18 |
| 23 | 122364535 | minus | 2357 | 2358 | 2359 | 2360 | GRIA3_ROI_8 |
| 19 | 11005347 | minus | 2361 | 2362 | 2363 | 2364 | SMARCA4_ROI_26 |
| 23 | 122426549 | minus | 2365 | 2366 | 2367 | 2368 | GRIA3_ROI_13 |
| 7 | 55226966 | minus | 2369 | 2370 | 2371 | 2372 | EGFR_ROI_22 |
| 1 | 58774623 | plus | 2373 | 2374 | 2375 | 2376 | OMA1_ROI_2 |
| 4 | 107373394 | plus | 2377 | 2378 | 2379 | 2380 | MGC16169_ROI_14 |
| 12 | 76858850 | minus | 2381 | 2382 | 2383 | 2384 | NAV3_ROI_3 |
| 5 | 112204035 | minus | 2385 | 2386 | 2387 | 2388 | APC_ROI_15 |
| 2 | 179355478 | minus | 2389 | 2390 | 2391 | 2392 | TTN_ROI_17 |
| 4 | 1773454 | minus | 2393 | 2394 | 2395 | 2396 | FGFR3_ROI_4 |
| 2 | 179364894 | plus | 2397 | 2398 | 2399 | 2400 | TTN_ROI_8 |
| 8 | 37810417 | minus | 2401 | 2402 | 2403 | 2404 | GPR124_ROI_10 |
| 2 | 80688784 | minus | 2405 | 2406 | 2407 | 2408 | CTNNA2_ROI_16 |
| 8 | 113328275 | plus | 2409 | 2410 | 2411 | 2412 | CSMD3_ROI_65 |
| 18 | 49215480 | minus | 2413 | 2414 | 2415 | 2416 | DCC_ROI_22 |
| 8 | 113432430 | plus | 2417 | 2418 | 2419 | 2420 | CSMD3_ROI_41 |
| 17 | 26709474 | plus | 2421 | 2422 | 2423 | 2424 | NF1_ROI_55 |
| 17 | 26507173 | minus | 2425 | 2426 | 2427 | 2428 | NF1_ROI_2 |
| 23 | 70596178 | minus | 2429 | 2430 | 2431 | 2432 | TAF1_ROI_34 |
| 5 | 14346046 | minus | 2433 | 2434 | 2435 | 2436 | TRIO_ROI_6 |
| 23 | 69638746 | minus | 2437 | 2438 | 2439 | 2440 | DLG3_ROI_22 |
| 18 | 51079664 | minus | 2441 | 2442 | 2443 | 2444 | TCF4_ROI_11 |
| 3 | 89239439 | plus | 2445 | 2446 | 2447 | 2448 | EPHA3_ROI_1 |
| 18 | 49177526 | plus | 2449 | 2450 | 2451 | 2452 | DCC_ROI_18 |
| 3 | 73522858 | minus | 2453 | 2454 | 2455 | 2456 | PDZRN3_ROI_6 |
| 12 | 77103362 | plus | 2457 | 2458 | 2459 | 2460 | NAV3_ROI_30 |
| 19 | 10996015 | minus | 2461 | 2462 | 2463 | 2464 | SMARCA4_ROI_20 |
| 10 | 55391368 | plus | 2465 | 2466 | 2467 | 2468 | PCDH15_ROI_21 |
| 7 | 148142888 | plus | 2469 | 2470 | 2471 | 2472 | EZH2_ROI_13 |
| 19 | 11002470 | minus | 2473 | 2474 | 2475 | 2476 | SMARCA4_ROI_24 |
| 7 | 55236225 | plus | 2477 | 2478 | 2479 | 2480 | EGFR_ROI_26 |
| 19 | 1005419 | plus | 2481 | 2482 | 2483 | 2484 | ABCA7_ROI_21 |
| 17 | 35136191 | plus | 2485 | 2486 | 2487 | 2488 | ERBB2_ROI_21 |
| 1 | 74574232 | plus | 2489 | 2490 | 2491 | 2492 | TNNI3K_ROI_7 |
| 1 | 74674202 | plus | 2493 | 2494 | 2495 | 2496 | TNNI3K_ROI_16 |
| 17 | 26616383 | minus | 2497 | 2498 | 2499 | 2500 | NF1_ROI_36 |
| 22 | 28400675 | plus | 2501 | 2502 | 2503 | 2504 | NF2_ROI_13 |
| 4 | 1776295 | minus | 2505 | 2506 | 2507 | 2508 | FGFR3_ROI_7 |
| 5 | 14560081 | plus | 2509 | 2510 | 2511 | 2512 | TRIO_ROI_55 |

[0066] The 5′ end and the 3′ end of the capture oliogonucleotides were blocked and did not contain phosphate or hydroxyl groups and 10 thymines were substituted with uracils to facilitate fragmentation and purification of the splint oligonucleotides after circularization. All oligonucleotides were synthesized at the Stanford Genome Technology Center (Stanford, Calif.). In an alternative design we substituted the central 40 bp of the capture oligonucleotide with a sequence comprising the Illlumina® sequencer adapter sequence. This has the advantage of creating amplicons ready for sequencing in a single amplification reaction, thus greatly facilitating the workflow. IIlumina® adapter sequences are available to anyone using their products; any approximately 35 bases, designed to allow attachment of the DNA to be sequenced to the surface of the flow cells used. Other sequencing systems would use other adapters.

### Targeted Genomic Circularization

[0067] High quality genomic DNA from flash-frozen tissues was first sonicated for 10 minutes in the Bioruptor to a size of 500-1000 bps. The hybridication reactions contained 0.5 μg dsDNA or 3-4 μg ddDNA and 50 pM of each of the capture oligonucleotides. After a brief denaturation step, the mixture was incubated in the PCR machine using a touchdown protocol ranging from 70-50° C. and 30-60 minutes for each step. Then a mixture of the cleavage enzymes (ExoI and Taq) and circularization enzyme (Ampligase or Taq ligase) were added to each tube and the reactions were incubated for 1 hour at 37° C. followed by a touchup protocol from 50-72° C. for 30 minute at each step. Excess oligonucleotides in the reactions were cleaved by uracil excision. After a brief purification using the Spin-20 columns, the captured DNA fragments were amplified using the high-fidelity Phusion polymerase and either the generic primer (e.g. ID 102) [9] or IIlumina PE-primers for 38-39 cycles. The PCR products were purified using the Fermentas kit.

### Sequencing Library Construction

[0068] The captured target DNA amplified with the generic PCR primers were ligated to PE-adapters after “A-tailing” and gel purified. They were then amplified for 10-12 cycles using the PE primers and re-purified from agarose gel. For DNA fragments captured with built-in PE primer sites, they were first purified away from the primer-dimers by gel electrophoresis and re-amplified for 5 cycles using the short PE primers. After quantitation by the SYBR based fluorescence assay, the libraries were sequenced on Illumina HiSeq or GAIIx using standard conditions.

### Sequencing

[0069] 10 pM of PCR amplified library and 1.5 pM of circularized DNA were sequenced using the Illumina Genome Analyzer IIx. Circular library obtained from 1 μg of starting material was introduced to the sequencing experiment. After sample dilution using hybridization buffer, 20% of the prepared sample (representing 200 ng of starting material) was hybridized in the flow cell.

### Data Analysis

[0070] Sequence reads were aligned to the human genome version hg19 using ELAND software. The target regions were defined as the ranges from each target specific site to 41 bases upstream or downstream of it (depending on the orientation of the capture oligonucleotide). The interval of 41 bases was selected because the read length in these experiments was 42. In a paired-end experiment the target region contained both ends of the circularized fragments, while single-read sequencing targeted only 3′ ends of the circularized fragments. To assess the specificity of the capture, the numbers of sequence reads mapping inside and outside the target region were compared. To illustrate the uniformity of the assay, the reads that aligned perfectly with the specific capture sequences were counted. Read counts were then sorted and normalized using the median sequence yield value from each experiment. The genomic distance between the target specific sites indicates the circle size. In addition, guanine and cytosine proportions within the target sites were determined. The present capture oligonucleotide contains two target specific sites and each site was analyzed separately. To analyze the annealing properties during circularization-hybridization reaction, target specific sites within a single capture oligonucleotide as high or low G+C were classified. Circle sizes and G+C proportions with the sequence yields for each oligonucleotide were then plotted.

### Example 2

### Assessment of Overall Capture Coverage

[0071] In a proof of principle experiment, we used a set of previously described capture oligonucleotides [9]. Because we had determined that amplicon size was an important parameter for this type of selective circularization, we chose a subset of 628 capture oligonucleotides, each targeting a 150-250 base region. The assay targets a total of 123,982 bases. We compared the yield and the reproducibility of targeting reactions using DNA extracted from either fresh frozen tissue or FFPE blocks of three individuals. Both fresh frozen and FFPE samples are derived from normal colon according to the pathology reports.

[0072] The resulting capture amplicons from matched genomic DNA samples derived from either flash-frozen or FFPE material were concatenated using T4 DNA ligase and mechanically fragmented prior to library preparation. Replicate sequencing was conducted in triplicate to identify sequencing specific errors. The fragmented amplicons ligated to a 4-plex paired-end indexing adapters for two samples from individuals 751 and 761 [13]. The four libraries were combined and sequenced in three separate lanes of an Illlumina GAIIx sequencer. For matched samples from individual 780, paired end sequencing was conducted on both the flash tissue and FFPE derived material in separate full sized lanes. Sequence reads were aligned to the human genome reference. Given the replicate sequencing and matched samples, there were a total of 14 separate sequencing data sets. Each was analyzed separately (Table 1).

TABLE 1
Capture yield comparison
total bases targeted: 123982

| | | | Coverage greater than: | | | cov >= | | | lane |
|---|---|---|---|---|---|---|---|---|---|
| patient | sample | replicate | 1 | 10 | 20 | 10(%) | average | median | fraction |
| 751 | ffpe | rep1 | 109560 | 104038 | 100403 | 84 | 2513.8 | 368 | 0.25 |
| | | rep2 | 110086 | 104274 | 100193 | 84 | 2485.6 | 367 | 0.25 |
| | | rep3 | 109981 | 104458 | 100223 | 84 | 2555.4 | 373 | 0.25 |
| | fresh | rep1 | 115336 | 109041 | 104225 | 88 | 2251 | 439 | 0.25 |
| | | rep2 | 115330 | 108512 | 103312 | 88 | 2190.8 | 427 | 0.25 |
| | | rep3 | 115308 | 108457 | 103683 | 87 | 2217 | 432 | 0.25 |
| 761 | ffpe | rep1 | 103859 | 97964 | 94008 | 79 | 2613.7 | 288 | 0.25 |
| | | rep2 | 104590 | 97536 | 93888 | 79 | 2594.2 | 288 | 0.25 |
| | | rep3 | 104374 | 97666 | 94077 | 79 | 2672.2 | 296 | 0.25 |
| | fresh | rep1 | 118489 | 111115 | 106580 | 90 | 3107.7 | 613 | 0.25 |
| | | rep2 | 118553 | 110841 | 106306 | 89 | 3083.3 | 612 | 0.25 |
| | | rep3 | 118632 | 111387 | 106717 | 90 | 3167.4 | 627 | 0.25 |
| 780 | ffpe | rep1 | 110890 | 104523 | 102638 | 84 | 14712.2 | 1748 | 1 |
| | fresh | rep1 | 118687 | 113881 | 110414 | 92 | 3414.13 | 691 | 1 |

[0073] Overall, the sequence coverage is very reproducible among the replicates for each individual's samples. As noted in Table 1 the sequence coverage at 10× coverage ranges from 79% to 92% and is 5 to 10% lower for the FFPE derived than for the flash tissue derived samples. The uniformity of capture between the two types of starting material and for all three patient's DNA was compared (FIG. 2). Approximately 5-10% fewer regions are captured with a sequence coverage greater than 10× in FFPE relative to flash-frozen tissue.

[0074] It was determined that the sensitivity of detection of heterozygote SNVs in the targeted resequencing from FFPE versus flash-frozen derived DNA. As described previously, SNV calling from each dataset was conducted [9]. The results of previous published analysis were advantageously used, demonstrating that the variant calling accuracy improves when relying on calls that can be established from both the forward or reverse strand (e.g. double-stranded) [9]. Of the 83 heterozygotes in high quality genomic DNA from flash-frozen tissue, 71 were also called from the FFPE-derived DNA for individual 751 (85%). Similar sensitivity values for the other two patients (84% and 85% respectively for individuals 761 and 780) were obtained.

### Example 3

### Evaluation of Sequencing Errors from the Archival Process

[0075] Given that matched samples from normal tissue of the same individual are used, differences between the SNV-calling results between FFPE versus flash-frozen derived DNA is attributable to FFPE-induced damage. Sequencing-related errors were eliminated based on the triplicate resequencing of each sample. As previously published, a straightforward statistical method to identify differences between matched samples which were previously applied to normal tumor pairs [9] was developed. At any given sequence position, the present method imposes that the difference in the second most frequent bases between the two samples exceeds 10% for both forward and reverse strand aligning reads. The 14 datasets were analyzed as seven matched pairs comparing sequence data from matched FFPE versus flash-frozen derived genomic DNA samples. The analysis yielded an average of 10.2 FFPE-specific calls (standard deviation being 4.2) per pair within the 102 Kb target (N=73 total positions for all pairs representing 45 unique positions). This results in one false positive call per every 12 Kb of targeted DNA. The FFPE-specific calls are replicated amongst the datasets that were sequenced in triplicate (patients 751 and 761) indicating that these errors were not attributable to the sequencing chemistry or processing but inherently found in the FFPE-derived DNA. There was no overlap between patients amongst these FFPE specific calls.

[0076] The pattern of FFPE-specific substitution errors were examined (Table 2). For substitutions, there are twelve combinations when considering all possibilities. Thirty one changes were transitions and 14 were transversions. Only 4 categories of substitutions among the 12 different substitutions were observed. This represented 44 out of the 45 observed cases. Nearly all of the observed changes obey the consensus G or C→A or T. The C→T and G→A transitions are compatible with cytosine deamination which is a common FFPE processing artifact [10].

TABLE 2
Substitutions specific to targeted resequencing of the FFPE sample

| | |
|---|---|
| Fresh | FFPE base |

| base | A | G | C | T |
|---|---|---|---|---|
| A | | 0 | 0 | 0 |
| G | 12 | | 0 | 8 |
| C | 6 | 0 | | 18 |
| T | 0 | 0 | 1 | |

Non-bolded: Transversions
Bolded: Transitions
Consensus: G or C → A or T

[0077] The above table shows that the chemical treatment involved in the FFPE process causes far fewer single base changes than are normally observed between individuals in the form of SNPs. Further, these chemical modifications are predictable as most likely being G->A or C->T. This means that the present methodology can be useful in an SNP analysis of genomic DNA from an FFPE sample.

[0078] It is noted that while just one position per 12 kb of targeted sequence results in an FFPE specific calls that passed a statistical significance cutoff for significance and was found in both the forward and reverse strands of capture sequence. From either FFPE or flash-frozen derived genomic DNA, a number of positions had suggestions of a variant but were typically seen only the forward or the reverse strand. Using the variant calling method which imposes double-stranded representation, these positions were effectively eliminated as false positive calls (FIG. 3).

### Example 4

### Optimizing Capture Oligonucleotide Parameters

[0079] Having obtained promising results from the initial capture oligonucleotides, an improved bioinformatic pipeline for in silico capture oligonucleotide design was developed. The present design process optimizes the placement of the targeting arms according to the following considerations: (1) it attempts to place the 20 bp targeting arms in positions unique over the genome and that have no single mismatch neighbor, (2) identifying capture arms with GC content between 30% and 60%, (3) the size distribution of the target genomic regions approximating 220 bases in length. The new design process was applied to the targeting 80 exons from six cancer genes. A total of 288 capture oligonucleotides were synthesized for this six gene capture assay and these pooled oligonucleotides were used on three matched normal and tumors samples from the same individual. One DNA sample was obtained from flash-frozen tumor tissue, one sample was obtained from an FFPE section and a third normal DNA sample was obtained peripheral lymphocytes. Significantly improved performance metrics were noted using these optimized capture parameters.

[0080] Further optimization of the present process was carried out to show amplicon length obtained at different temperatures with the 628 capture oligonucleotides used. Ranges from 50 deg. to 60 deg. annealing temperatures showed no size bias between an amplicon length of 150-250 bp. Annealing temperature of 50 deg. was shown to yield a higher number of amplified targets. Also, consistent coverage across the amplicon lengths between 150 and 250 bp was shown. It was also shown that the process was tolerant of hairpin structures that can form in ssDNA that is being captured by the present capture probes.

[0081] As another novel feature, the sequencing library adapter sequences were incorporated into the universal vector sequence. This enabled a sequencing read library with a single amplification step to be generated, thus significantly reducing the complexity of the workflow used for next generation sequencing instruments such as the Illumina HiSeq, GAIIx, MiSeq, Life Sciences Solid, Ion Torrent, Pacific Biosciences system and the Roche 454 sequencer among others.

[0082] The present compositions may be provided in kit form, comprising a set of capture probes and universal oligonucleotides. Primers and a polymerase for amplification may also be included in the kit.

### CONCLUSION

[0083] The above specific description is meant to exemplify and illustrate the invention and should not be seen as limiting the scope of the invention, which is defined by the literal and equivalent scope of the appended claims. Any patents or publications mentioned in this specification are intended to convey details of methods and materials useful in carrying out certain aspects of the invention which may not be explicitly set out but which would be understood by workers in the field. Such patents or publications are hereby incorporated by reference to the same extent as if each was specifically and individually incorporated by reference and contained herein, as needed for the purpose of describing and enabling the method or material referred to.

### REFERENCES

[0084] 1. Albert T J, Molla M N, Muzny D M, Nazareth L, Wheeler D, Song X, Richmond T A, Middle C M, Rodesch M J, Packard C J, et al: Direct selection of human genomic loci by microarray hybridization. Nat Methods 2007, 4:903-905.
[0085] 2. Hodges E, Xuan Z, Balija V, Kramer M, Molla M N, Smith S W, Middle C M, Rodesch M J, Albert T J, Hannon G J, McCombie W R: Genome-wide in situ exon capture for selective resequencing. Nat Genet. 2007, 39:1522-1527.
[0086] 3. Okou D T, Steinberg K M, Middle C, Cutler D J, Albert T J, Zwick M E: Microarray-based genomic selection for high-throughput resequencing. Nat Methods 2007, 4:907-909.
[0087] 4. Gnirke A, Melnikov A, Maguire J, Rogov P, Leproust E, Brockman W, Fennell T, Giannoukos G, Fisher S, Russ C, et al: Solution hybrid selection with ultra-long oligonucleotides for massively parallel targeted sequencing. Nat Biotechnol 2009.
[0088] 5. Varley K E, Mitra R D: Nested Patch PCR enables highly multiplexed mutation discovery in candidate genes. Genome Res 2008, 18:1844-1850.
[0089] 6. Tewhey R, Warner J B, Nakano M, Libby B, Medkova M, David P H, Kotsopoulos S K, Samuels M L, Hutchison J B, Larson J W, et al: Microdroplet-based PCR enrichment for large-scale targeted sequencing. Nat Biotechnol 2009, 27:1025-1031.
[0090] 7. Porreca G J, Zhang K, Li J B, Xie B, Austin D, Vas sallo SL, LeProust E M, Peck B J, Emig C J, Dahl F, et al: Multiplex amplification of large sets of human exons. Nat Methods 2007, 4:931-936.
[0091] 8. Turner E H, Lee C, Ng S B, Nickerson D A, Shendure J: Massively parallel exon capture and library-free resequencing across 16 genomes. Nat Methods 2009, 6:315-316.
[0092] 9. Natsoulis G, Bell J M, Xu H, Buenrostro J D, Ordonez H, Grimes S, Newburger D, Jensen M, Zahn J M, Zhang N, Ji H P: A flexible approach for highly multiplexed candidate gene targeted resequencing. PLOS one 2011, 6:e21088.
[0093] 10. Kerick M, Isau M, Timmermann B, Sultmann H, Herwig R, Krobitsch S, Schaefer G, Verdorfer I, Bartsch G, Klocker H, et al: Targeted high throughput sequencing in clinical cancer Settings: formaldehyde fixed-paraffin embedded (FFPE) tumor tissues, input amount and tumor heterogeneity. BMC Med Genomics 2011, 4:68.
[0094] 11. Ji H, Welch K: Molecular inversion probe assay for allelic quantitation. Methods Mol Biol 2009, 556:67-87.
[0095] 12. Lehman I R, Nussbaum A L: The Deoxyribonucleases of Escherichia Coli. V. On the Specificity of Exonuclease I (Phosphodiesterase). J Biol Chem 1964, 239:2628-2636.
[0096] 13. Flaherty P, Natsoulis G, Muralidharan O, Winters M, Buenrostro J, Bell J, Brown S, Holodniy M, Zhang N, Ji H P: Ultrasensitive detection of rare mutations using next-generation targeted resequencing. Nucleic Acids Res 2011.
[0097] 14. Korn J M, Kuruvilla F G, McCarron S A, Wysoker A, Nemesh J, Cawley S, Hubbell E, Veitch J, Collins P J, Darvishi K, et al: Integrated genotype calling and association analysis of SNPs, common copy number polymorphisms and rare CNVs. Nat Genet. 2008, 40:1253-1260.
[0098] 15. Lyamichev V, Brow M A, Dahlberg J E: Structure-specific endonucleolytic cleavage of nucleic acids by eubacterial DNA polymerases. Science 1993, 260:778-783.

MEGA

What is claimed is:

1. A composition useful for preparing a population of double stranded DNA molecules from a sample containing single stranded polynucleic acids, comprising:
(a) a plurality of polynucleotide capture probes, wherein individual capture probes each contain (i) capture arms at a 3′ end a 5′ end of the probe for hybridizing to specific portions of a single stranded polynucleic acid in the sample and (ii) an invariant sequence between the capture arms, whereby a circular structure comprising a specific capture probe and a polynucleic acid having regions complementary to the capture arms is formed;
(b) a plurality of second polynucleotides having a sequence complementary to the invariant sequence;
(c) a 5′ exonuclease;
(d) a 3′ exonuclease; and
(e) a ligase.

2. The composition of claim 1 further comprising at least one of (a) PCR amplification and (b) a DNA polymerase.

3. The composition of claim 1, further comprising a sample comprising single stranded polynucleic acids which are fragments of human genomic DNA.

4. The composition of claim 1, further comprising a sample comprising single stranded polynucleic acids which are fragments of human genomic DNA that have been fixed by crosslinking and embedded in a wax.

5. The composition of claim 1, wherein the polynucleotide capture probes in the composition comprise at least 500 different capture arm sequences.

6. The composition of claim 1, wherein the 5′ exonuclease is Exonuclease I.

7. The composition of claim 1, wherein the 3′ exonuclease is also a DNA polymerase.

8. The composition of claim 1, wherein the 3′ exonuclease is a thermostable DNA polymerase.

9. The composition of claim 1, wherein the ligase is a thermostable DNA ligase and the circular structure is formed by DNA molecules.

10. The composition of claim 1, wherein the second polynucleotide comprises PCR amplification sites and the composition comprises PCR primers complementary thereto.

11. The composition of claim 10, wherein the PCR amplification sites are spaced on the second polynucleotides about 120 to 250 bases apart.

12. A method for analyzing single stranded polynucleotides in a sample, comprising the steps of:
(a) adding to the sample a plurality of polynucleotide capture probes, each capture probe containing capture arms complementary to specific portions of a polynucleic acid in the sample and an invariant sequence between the arms, whereby a circular structure comprising a specific capture probe and a polynucleic acid sample molecule is formed;
(b) adding to the sample a plurality of second polynucleotides having a sequence complementary to the invariant sequence and having amplification sites for amplification of a polynucleic acid in a circular structure; and
(c) adding to the sample containing capture probes and second polynucleotides a mixture of a 5′ exonuclease, a 3′ exonuclease, and a ligase under conditions whereby exonucleases remove bases from the single stranded polynucleotides to form a new 5′ end thereof and a new 3′ end thereof, and the ligase ligates the new 5′ end to the new 3′ end.

13. The method of claim 12 further comprising the step of composition of claim 1 further comprising at least one of amplification primers and a polymerase.

14. The method of claim 12, wherein the single stranded polynucleic acids are fragments of human genomic DNA.

15. The method of claim 12, wherein the single stranded polynucleic acids are fragments of human genomic DNA that have been fixed by crosslinking and embedded in a wax.

16. The method of claim 12 wherein the capture probes comprise at least 500 different probes.

17. The method of claim 12, wherein the 5′ exonuclease is Exonuclease I.

18. The method of claim 12, wherein the 3′ exonuclease is also a polymerase.

19. The method of claim 12, wherein the 3′ exonuclease is a thermostable polymerase.

20. The method of claim 12, wherein the ligase is a thermostable DNA ligase and the circular structure is formed by DNA molecules.

21. A method for analyzing single stranded polynucleotides from a sample, comprising the steps of:
(a) adding to the sample a plurality of polynucleotide capture probes, each capture probe containing capture arms complementary to specific portions of a polynucleic acid in the sample and an invariant sequence between the arms, whereby a circular structure comprising a specific capture probe and a polynucleic acid sample molecule is formed in the buffer;
(b) adding to the sample a plurality of second polynucleotides having a sequence complementary to the invariant sequence and having amplification sites for amplification of a polynucleic acid in a circular structure; and
(c) adding to the sample containing capture probes and second polynucleotides a mixture of a 5′ exonuclease, a 3′ exonuclease, and a ligase under conditions whereby exonucleases remove bases from the single stranded polynucleotides to form a new 5′ end thereof and a new 3′ end thereof, and the ligase ligates the new 5′ end to the new 3′ end;
(d) adding to the sample a polymerase and polymerase primers; and
(e) conducting a polymerase chain reaction using the polymerase primers for amplification of a portion of a single stranded polynucleotide captured by a corresponding capture probe.

22. The method of claim 21 further comprising the step of sequencing amplified polynucleotides from step (e).

23. The method of claim 21 wherein the polymerase chain reaction utilizes an annealing temperature of between about 45 degrees Celsius and 55 degrees Celsius.

24. The method of claim 21 wherein the analyzing single stranded polynucleotides from a sample comprises analyzing polynucleotides from a preserved tissue sample or analyzing polynucleotides from a preserved tissue sample and analyzing polynucleotides from a fresh sample from the same individual.

25. A kit for preparing a composition according to claim 1 comprising:
(a) a plurality of capture probes, each capture probe containing (i) 5′ and 3′ end capture arms complementary to specific portions of a polynucleic acid in the sample and (ii) an invariant sequence between the capture arms, whereby a circular structure comprising a specific capture probe and a polynucleic acid sample molecule having regions complementary to the capture arms is formed in the buffer;
(b) a plurality of second polynucleotides having a sequence complementary to the invariant sequence and having amplification sites for amplification of a polynucleic acid in a circular structure; and
(c) a 5′ exonuclease, a 3′ exonuclease, and a ligase.

26. The kit according to claim 25, wherein said kit further comprises at least one of amplification primers and a polymerase.

The application's sequence listing, which the Patent Office published only in electronic form, follows.

SEQUENCE LISTING (2512 sequences)

SEQ ID NO: 1 - DNA, 20 bp, Artificial Sequence
  Description of Artificial Sequence: Synthetic primer
cttgcttttctatcttaatt

SEQ ID NO: 2 - DNA, 20 bp, Artificial Sequence
  Description of Artificial Sequence: Synthetic primer
cctaataaaagttataagac

SEQ ID NO: 3 - DNA, 150 bp, Artificial Sequence
  Description of Artificial Sequence: Synthetic polynucleotide
cctaataaaagttataagacagtttaggattttcttaacttaaaaaacagcataatgaacaatatttgcacttaaaatattttagtttattagctaataaggtttttatttgcttggagacaacatctatcttgcttttctatcttaatt

SEQ ID NO: 4 - DNA, 80 bp, Artificial Sequence
  Description of Artificial Sequence: Synthetic oligonucleotide
  Description of Combined DNA/RNA Molecule: Synthetic oligonucleotide
cttgctttuctatcttaattacgauaacggtacaaggctaaagcuutgctaacggucgagcctaataaaagutataagac

SEQ ID NO: 5 - DNA, 20 bp, Artificial Sequence
  Description of Artificial Sequence: Synthetic primer
gacaatggttttccattcat

SEQ ID NO: 6 - DNA, 20 bp, Artificial Sequence
  Description of Artificial Sequence: Synthetic primer
cctgaaacaaatattgtaat

SEQ ID NO: 7 - DNA, 150 bp, Artificial Sequence
  Description of Artificial Sequence: Synthetic polynucleotide
cctgaaacaaatattgtaataaatgcttttctcttccaaaatatcaaacactgatatttgttgaattgatatttactgactctgagacaaggtttttttccccaagcaaagacccacttctatctaagtagacaatggttttccattcat

SEQ ID NO: 8 - DNA, 80 bp, Artificial Sequence
  Description of Artificial Sequence: Synthetic oligonucleotide
  Description of Combined DNA/RNA Molecule: Synthetic oligonucleotide
gacaatggtuttccattcatacgauaacggtacaaggctaaagcuutgctaacggucgagcctgaaacaaauattgtaat

SEQ ID NO: 9 - DNA, 20 bp, Artificial Sequence
  Description of Artificial Sequence: Synthetic primer
agggggccgctagggtagta

SEQ ID NO: 10 - DNA, 20 bp, Artificial Sequence
  Description of Artificial Sequence: Synthetic primer
ctgctccttgagctgctgca

SEQ ID NO: 11 - DNA, 150 bp, Artificial Sequence
  Description of Artificial Sequence: Synthetic polynucleotide
ctgctccttgagctgctgcatcttgtgggcgcgcacgatgctcaggcactccagctcgatgctgcgcagctcttcgttcagcagctccagctccttgtccacgctctcagggtcactcttgccggcgtccagggggccgctagggtagta

SEQ ID NO: 12 - DNA, 80 bp, Artificial Sequence
  Description of Artificial Sequence: Synthetic oligonucleotide
  Description of Combined DNA/RNA Molecule: Synthetic oligonucleotide
agggggccgcuagggtagtaacgauaacggtacaaggctaaagcuutgctaacggucgagctgctcctugagctgctgca

SEQ ID NO: 13 - DNA, 20 bp, Artificial Sequence
  Description of Artificial Sequence: Synthetic primer
cctaccaggaaatgggggta

SEQ ID NO: 14 - DNA, 20 bp, Artificial Sequence
  Description of Artificial Sequence: Synthetic primer
ctctgcagctctctcacaat

SEQ ID NO: 15 - DNA, 150 bp, Artificial Sequence
  Description of Artificial Sequence: Synthetic polynucleotide
ctctgcagctctctcacaatggcgcctacctggatttggaggccaccctggcagagcagcgggatgagttggaaggcttccaggatgacgccgggtaagagcaactgttcaccctgctgactggtccccacctaccaggaaatgggggta

SEQ ID NO: 16 - DNA, 80 bp, Artificial Sequence
  Description of Artificial Sequence: Synthetic oligonucleotide
  Description of Combined DNA/RNA Molecule: Synthetic oligonucleotide
cctaccaggaaaugggggtaacgauaacggtacaaggctaaagcuutgctaacggucgagctctgcagcuctctcacaat

SEQ ID NO: 17 - DNA, 20 bp, Artificial Sequence
  Description of Artificial Sequence: Synthetic primer
cagtaaagccttcagaaaga

SEQ ID NO: 18 - DNA, 20 bp, Artificial Sequence
  Description of Artificial Sequence: Synthetic primer
cctggatgaattgaaaaata

SEQ ID NO: 19 - DNA, 150 bp, Artificial Sequence
  Description of Artificial Sequence: Synthetic polynucleotide
cctggatgaattgaaaaataggtattcattaggctgaataaaatttaattcaatggcaaaataaaacagctaaaatttctattgaaaagagtgctttccagttgaatgatatgacaagaaaaactgaggccagtaaagccttcagaaaga

SEQ ID NO: 20 - DNA, 80 bp, Artificial Sequence
  Description of Artificial Sequence: Synthetic oligonucleotide
  Description of Combined DNA/RNA Molecule: Synthetic oligonucleotide
cagtaaagccutcagaaagaacgauaacggtacaaggctaaagcuutgctaacggucgagcctggatgaautgaaaaata

SEQ ID NO: 21 - DNA, 20 bp, Artificial Sequence
  Description of Artificial Sequence: Synthetic primer
gtggcccggggcatggagta

SEQ ID NO: 22 - DNA, 20 bp, Artificial Sequence
  Description of Artificial Sequence: Synthetic primer
cgcggccaagggtaacctgc

SEQ ID NO: 23 - DNA, 150 bp, Artificial Sequence
  Description of Artificial Sequence: Synthetic polynucleotide
cgcggccaagggtaacctgcgggagtttctgcgggcgcggcggcccccgggcctggactactccttcgacacctgcaagccgcccgaggagcagctcaccttcaaggacctggtgtcctgtgcctaccaggtggcccggggcatggagta

SEQ ID NO: 24 - DNA, 80 bp, Artificial Sequence
  Description of Artificial Sequence: Synthetic oligonucleotide
  Description of Combined DNA/RNA Molecule: Synthetic oligonucleotide
gtggcccggggcauggagtaacgauaacggtacaaggctaaagcuutgctaacggucgagcgcggccaaggguaacctgc

SEQ ID NO: 25 - DNA, 20 bp, Artificial Sequence
  Description of Artificial Sequence: Synthetic primer
tctggttgcattctgaagct

SEQ ID NO: 26 - DNA, 20 bp, Artificial Sequence
  Description of Artificial Sequence: Synthetic primer
cactgttttcatgatcatga

SEQ ID NO: 27 - DNA, 150 bp, Artificial Sequence
  Description of Artificial Sequence: Synthetic polynucleotide
agcttcagaatgcaaccagacatgtccttgaatgtcattaagatgaaatccagtgacttcctggagagtgcagaactggacagcggaggctttgggaaggtgtctctgtgtttccacagaacccagggactcatgatcatgaaaacagtg

SEQ ID NO: 28 - DNA, 80 bp, Artificial Sequence
  Description of Artificial Sequence: Synthetic oligonucleotide
  Description of Combined DNA/RNA Molecule: Synthetic oligonucleotide
tctggttgcautctgaagctacgauaacggtacaaggctaaagcuutgctaacggucgagcactgtttucatgatcatga

SEQ ID NO: 29 - DNA, 20 bp, Artificial Sequence
  Description of Artificial Sequence: Synthetic primer
catttgatgatgagcatgta

SEQ ID NO: 30 - DNA, 20 bp, Artificial Sequence
  Description of Artificial Sequence: Synthetic primer
catagagaaaaagtgattct

SEQ ID NO: 31 - DNA, 150 bp, Artificial Sequence
  Description of Artificial Sequence: Synthetic polynucleotide
catagagaaaaagtgattcttgcatttcaggtttgtgttgtcatcttttttcttagattgtatgcaggtcctgaagttgatatctggagctgtggtgttatcttgtatgctcttctttgtggcaccctcccatttgatgatgagcatgta

SEQ ID NO: 32 - DNA, 80 bp, Artificial Sequence
  Description of Artificial Sequence: Synthetic oligonucleotide
  Description of Combined DNA/RNA Molecule: Synthetic oligonucleotide
catttgatgaugagcatgtaacgauaacggtacaaggctaaagcuutgctaacggucgagcatagagaaaaagugattct

SEQ ID NO: 33 - DNA, 20 bp, Artificial Sequence
  Description of Artificial Sequence: Synthetic primer
tgattttacagtttgaagta

SEQ ID NO: 34 - DNA, 20 bp, Artificial Sequence
  Description of Artificial Sequence: Synthetic primer
cctgcagaattgcagagcaa

SEQ ID NO: 35 - DNA, 151 bp, Artificial Sequence
  Description of Artificial Sequence: Synthetic polynucleotide
tacttcaaactgtaaaatcacaactttcaggaaatgtgataaatttagtgggaaaaaaatttaatgcacgccttgcaaaggcttctttgagggtagcacaggaggaagtgccaatatagtgtgtttgtcttttgctctgcaattctgcagg

SEQ ID NO: 36 - DNA, 80 bp, Artificial Sequence
  Description of Artificial Sequence: Synthetic oligonucleotide
  Description of Combined DNA/RNA Molecule: Synthetic oligonucleotide
tgattttacaguttgaagtaacgauaacggtacaaggctaaagcuutgctaacggucgagcctgcagaautgcagagcaa

SEQ ID NO: 37 - DNA, 20 bp, Artificial Sequence
  Description of Artificial Sequence: Synthetic primer
acaccagtcctcctgtgaaa

SEQ ID NO: 38 - DNA, 20 bp, Artificial Sequence
  Description of Artificial Sequence: Synthetic primer
cctgcagaggacagcagcag

SEQ ID NO: 39 - DNA, 151 bp, Artificial Sequence
  Description of Artificial Sequence: Synthetic polynucleotide
tttcacaggaggactggtgtttgaagtgaaagttgtttttccttacgtgagaggtggaaaatggagttgagtttctgaggtggggcgaggctgtcggagctgcgagtgagtggcagaggctgctggtcacactgctgctgtcctctgcagg

SEQ ID NO: 40 - DNA, 80 bp, Artificial Sequence
  Description of Artificial Sequence: Synthetic oligonucleotide
  Description of Combined DNA/RNA Molecule: Synthetic oligonucleotide
acaccagtccucctgtgaaaacgauaacggtacaaggctaaagcuutgctaacggucgagccugcagaggacagcagcag

SEQ ID NO: 41 - DNA, 20 bp, Artificial Sequence
  Description of Artificial Sequence: Synthetic primer
agtgtgggcctcacctctgg

SEQ ID NO: 42 - DNA, 20 bp, Artificial Sequence
  Description of Artificial Sequence: Synthetic primer
cctacaacagggcagggacc

SEQ ID NO: 43 - DNA, 151 bp, Artificial Sequence
  Description of Artificial Sequence: Synthetic polynucleotide
ccagaggtgaggcccacactgtcctgcagggagagaagtgcccgtgccaatccctcctgatacccaagcagccagcactcagtccctggcatcagcactggtgggcccaagagccataaccacagtgcctgggtccctgccctgttgtagg

SEQ ID NO: 44 - DNA, 80 bp, Artificial Sequence
  Description of Artificial Sequence: Synthetic oligonucleotide
  Description of Combined DNA/RNA Molecule: Synthetic oligonucleotide
agtgtgggccucacctctggacgauaacggtacaaggctaaagcuutgctaacggucgagccuacaacagggcagggacc

SEQ ID NO: 45 - DNA, 20 bp, Artificial Sequence
  Description of Artificial Sequence: Synthetic primer
tctgggatttgaagcactca

SEQ ID NO: 46 - DNA, 20 bp, Artificial Sequence
  Description of Artificial Sequence: Synthetic primer
cctgctcgccccaattaaga

SEQ ID NO: 47 - DNA, 151 bp, Artificial Sequence
  Description of Artificial Sequence: Synthetic polynucleotide
tgagtgcttcaaatcccagagctctagttgcaggaaaaaacattgagggggaaaatgggcagaacccagcatgccaggcaaggcttagtggctgcctgtttaaatcaacgtttagagacccgtgggtttgttcttaattggggcgagcagg

SEQ ID NO: 48 - DNA, 80 bp, Artificial Sequence
  Description of Artificial Sequence: Synthetic oligonucleotide
  Description of Combined DNA/RNA Molecule: Synthetic oligonucleotide
tctgggattugaagcactcaacgauaacggtacaaggctaaagcuutgctaacggucgagcctgcucgccccaattaaga

SEQ ID NO: 49 - DNA, 20 bp, Artificial Sequence
  Description of Artificial Sequence: Synthetic primer
agtgaacacctgccttacag

SEQ ID NO: 50 - DNA, 20 bp, Artificial Sequence
  Description of Artificial Sequence: Synthetic primer
ccttcaagccggtcaaattc

SEQ ID NO: 51 - DNA, 151 bp, Artificial Sequence
  Description of Artificial Sequence: Synthetic polynucleotide
ccttcaagccggtcaaattcaggtaaattacactatggtcaaaatctattcatttatttgtttggttactcattcactccactctctaaaagactattcaggaccatatgggaaacagaagaaactataaaagtgaacacctgccttacag

SEQ ID NO: 52 - DNA, 80 bp, Artificial Sequence
  Description of Artificial Sequence: Synthetic oligonucleotide
  Description of Combined DNA/RNA Molecule: Synthetic oligonucleotide
agtgaacaccugccttacagacgauaacggtacaaggctaaagcuutgctaacggucgagccttcaagccggucaaattc

SEQ ID NO: 53 - DNA, 20 bp, Artificial Sequence
  Description of Artificial Sequence: Synthetic primer
cttccataactcttatcttg

SEQ ID NO: 54 - DNA, 20 bp, Artificial Sequence
  Description of Artificial Sequence: Synthetic primer
cctggggaagagaagaggta

SEQ ID NO: 55 - DNA, 151 bp, Artificial Sequence
  Description of Artificial Sequence: Synthetic polynucleotide
caagataagagttatggaagcttgacctagaaaggggactctcccaatgaagcaaacacatttgcaaatgctttaagatggaccgctcaggattgcatccagcctttagctattagacttgaacaggtttctacctcttctcttccccagg

SEQ ID NO: 56 - DNA, 80 bp, Artificial Sequence
  Description of Artificial Sequence: Synthetic oligonucleotide
  Description of Combined DNA/RNA Molecule: Synthetic oligonucleotide
cttccataacucttatcttgacgauaacggtacaaggctaaagcuutgctaacggucgagccuggggaagagaagaggta

SEQ ID NO: 57 - DNA, 20 bp, Artificial Sequence
  Description of Artificial Sequence: Synthetic primer
tcccgactcctcgtccctct

SEQ ID NO: 58 - DNA, 20 bp, Artificial Sequence
  Description of Artificial Sequence: Synthetic primer
catcctgccctgggcacccc

SEQ ID NO: 59 - DNA, 152 bp, Artificial Sequence
  Description of Artificial Sequence: Synthetic polynucleotide
catcctgccctgggcaccccaacataggtcagtgtgcagccagaaagcacctcccctcccccgggcttctccacggtggtcagtggcgccccacgtccagccgaccgctcaggacgagagcctgggggccattcccgactcctcgtccctct

SEQ ID NO: 60 - DNA, 80 bp, Artificial Sequence
  Description of Artificial Sequence: Synthetic oligonucleotide
  Description of Combined DNA/RNA Molecule: Synthetic oligonucleotide
tcccgactccucgtccctctacgauaacggtacaaggctaaagcuutgctaacggucgagcatcctgcccugggcacccc

SEQ ID NO: 61 - DNA, 20 bp, Artificial Sequence
  Description of Artificial Sequence: Synthetic primer
ctccttcctcacctccctgc

SEQ ID NO: 62 - DNA, 20 bp, Artificial Sequence
  Description of Artificial Sequence: Synthetic primer
caggtgagggcggggcccag

SEQ ID NO: 63 - DNA, 152 bp, Artificial Sequence
  Description of Artificial Sequence: Synthetic polynucleotide
caggtgagggcggggcccagttgccaaggtcactgccctgtgtcccccatgtccccctggggaagccactcaactttctcccccactctagcaaacagtgccctgtgcccaccactgccacttggcctacacctccttcctcacctccctgc

SEQ ID NO: 64 - DNA, 80 bp, Artificial Sequence
  Description of Artificial Sequence: Synthetic oligonucleotide
  Description of Combined DNA/RNA Molecule: Synthetic oligonucleotide
ctccttccucacctccctgcacgauaacggtacaaggctaaagcuutgctaacggucgagcaggugagggcggggcccag

SEQ ID NO: 65 - DNA, 20 bp, Artificial Sequence
  Description of Artificial Sequence: Synthetic primer
gacatctacagacacttcct

SEQ ID NO: 66 - DNA, 20 bp, Artificial Sequence
  Description of Artificial Sequence: Synthetic primer
ccactaaggaaaaaaaaatc

SEQ ID NO: 67 - DNA, 152 bp, Artificial Sequence
  Description of Artificial Sequence: Synthetic polynucleotide
ccactaaggaaaaaaaaatcaatgcagtcaagtagaaagaactaaactatgaaaggagacagggcatggctggttgatttgaggcagaggggccaggctggggctagaggatggggaaagatcatgactcatgacatctacagacacttcct

SEQ ID NO: 68 - DNA, 80 bp, Artificial Sequence
  Description of Artificial Sequence: Synthetic oligonucleotide
  Description of Combined DNA/RNA Molecule: Synthetic oligonucleotide
gacatcuacagacacttcctacgauaacggtacaaggctaaagcuutgctaacggucgagccacuaaggaaaaaaaaatc

SEQ ID NO: 69 - DNA, 20 bp, Artificial Sequence
  Description of Artificial Sequence: Synthetic primer
gagaggccaaggcctggcag

SEQ ID NO: 70 - DNA, 20 bp, Artificial Sequence
  Description of Artificial Sequence: Synthetic primer
caggtcagttatgggtgctg

SEQ ID NO: 71 - DNA, 152 bp, Artificial Sequence
  Description of Artificial Sequence: Synthetic polynucleotide
caggtcagttatgggtgctgcctacatcaggggacccaactccaggtgactctggacagcagagcaggcagggctcctcagagatgagctaggccagccctagcgtcaagagcagaaagaccaaagatcagagagaggccaaggcctggcag

SEQ ID NO: 72 - DNA, 80 bp, Artificial Sequence
  Description of Artificial Sequence: Synthetic oligonucleotide
  Description of Combined DNA/RNA Molecule: Synthetic oligonucleotide
gagaggccaaggccuggcagacgauaacggtacaaggctaaagcuutgctaacggucgagcaggtcagtuatgggtgctg

SEQ ID NO: 73 - DNA, 20 bp, Artificial Sequence
  Description of Artificial Sequence: Synthetic primer
cgatcacattcgattctagc

SEQ ID NO: 74 - DNA, 20 bp, Artificial Sequence
  Description of Artificial Sequence: Synthetic primer
cctctgaaagaaaatgaaga

SEQ ID NO: 75 - DNA, 152 bp, Artificial Sequence
  Description of Artificial Sequence: Synthetic polynucleotide
cctctgaaagaaaatgaagatgctttcagctcccaaatgcccattttcctaactaagataggttaaaccacaaagacttctagatgataccacatttccttaaatcattaccttagcaaactgtagttaccacgatcacattcgattctagc

SEQ ID NO: 76 - DNA, 80 bp, Artificial Sequence
  Description of Artificial Sequence: Synthetic oligonucleotide
  Description of Combined DNA/RNA Molecule: Synthetic oligonucleotide
cgatcacatucgattctagcacgauaacggtacaaggctaaagcuutgctaacggucgagcctctgaaagaaaaugaaga

SEQ ID NO: 77 - DNA, 20 bp, Artificial Sequence
  Description of Artificial Sequence: Synthetic primer
gatacatggcccctgaagta

SEQ ID NO: 78 - DNA, 20 bp, Artificial Sequence
  Description of Artificial Sequence: Synthetic primer
cacttcttctgccccaaggg

SEQ ID NO: 79 - DNA, 152 bp, Artificial Sequence
  Description of Artificial Sequence: Synthetic polynucleotide
cacttcttctgccccaagggactttatcagggtgatactcttccacattcagagggctcctgaatcaatactttgatttaaagagagcagtcatcattttctgtgcgtgaccatgtttgttttgctattgcagatacatggcccctgaagta

SEQ ID NO: 80 - DNA, 80 bp, Artificial Sequence
  Description of Artificial Sequence: Synthetic oligonucleotide
  Description of Combined DNA/RNA Molecule: Synthetic oligonucleotide
gatacauggcccctgaagtaacgauaacggtacaaggctaaagcuutgctaacggucgagcacttcttcugccccaaggg

SEQ ID NO: 81 - DNA, 20 bp, Artificial Sequence
  Description of Artificial Sequence: Synthetic primer
ctctgcttcactccccatgc

SEQ ID NO: 82 - DNA, 20 bp, Artificial Sequence
  Description of Artificial Sequence: Synthetic primer
cccgtgagtagttttgctgc

SEQ ID NO: 83 - DNA, 152 bp, Artificial Sequence
  Description of Artificial Sequence: Synthetic polynucleotide
cccgtgagtagttttgctgcaacccatgcctccatgtttgttttgttttcttcttgttactgtgctgtttgtttttgttttaaagcatttggcccatttccttctgttgcccgtgtgcaaattgaaagctttctctgcttcactccccatgc

SEQ ID NO: 84 - DNA, 80 bp, Artificial Sequence
  Description of Artificial Sequence: Synthetic oligonucleotide
  Description of Combined DNA/RNA Molecule: Synthetic oligonucleotide
ctctgctucactccccatgcacgauaacggtacaaggctaaagcuutgctaacggucgagcccgtgaguagttttgctgc

SEQ ID NO: 85 - DNA, 20 bp, Artificial Sequence
  Description of Artificial Sequence: Synthetic primer
gctggtctcctggtcgtggg

SEQ ID NO: 86 - DNA, 20 bp, Artificial Sequence
  Description of Artificial Sequence: Synthetic primer
cagaaggaggcagatcatat

SEQ ID NO: 87 - DNA, 152 bp, Artificial Sequence
  Description of Artificial Sequence: Synthetic polynucleotide
cagaaggaggcagatcatatggtgctaacctatctctcttttttgttgcagaaggacaagaggatgctattttgtcatatgagccagtgacacggcaagaaagtaagcctcctctgagagccttgtcttcgtgctggtctcctggtcgtggg

SEQ ID NO: 88 - DNA, 80 bp, Artificial Sequence
  Description of Artificial Sequence: Synthetic oligonucleotide
  Description of Combined DNA/RNA Molecule: Synthetic oligonucleotide
gctggtctccuggtcgtgggacgauaacggtacaaggctaaagcuutgctaacggucgagcagaaggaggcagaucatat

SEQ ID NO: 89 - DNA, 20 bp, Artificial Sequence
  Description of Artificial Sequence: Synthetic primer
caacctttttttcatgtgta

SEQ ID NO: 90 - DNA, 20 bp, Artificial Sequence
  Description of Artificial Sequence: Synthetic primer
ccatcctgatctaaaacttc

SEQ ID NO: 91 - DNA, 152 bp, Artificial Sequence
  Description of Artificial Sequence: Synthetic polynucleotide
ccatcctgatctaaaacttcatctcccatataaggaatgttatgtaaaacagtttcatcttccacctaaaagaaaaaaatatatttaaaaagcaggtttactctaagtatcaaatgtgaaataactaaaatacaacctttttttcatgtgta

SEQ ID NO: 92 - DNA, 80 bp, Artificial Sequence
  Description of Artificial Sequence: Synthetic oligonucleotide
  Description of Combined DNA/RNA Molecule: Synthetic oligonucleotide
caaccttttuttcatgtgtaacgauaacggtacaaggctaaagcuutgctaacggucgagccatcctgauctaaaacttc

SEQ ID NO: 93 - DNA, 20 bp, Artificial Sequence
  Description of Artificial Sequence: Synthetic primer
gatgctcaagaattctgaat

SEQ ID NO: 94 - DNA, 20 bp, Artificial Sequence
  Description of Artificial Sequence: Synthetic primer
cacctgcggacgcagggcca

SEQ ID NO: 95 - DNA, 153 bp, Artificial Sequence
  Description of Artificial Sequence: Synthetic polynucleotide
attcagaattcttgagcatcaagttgggctgtgtgtgtatgttggggctgagaggcatgtcgggggtgtgtgtgtgcacgtgcgcacacgtgcatgcactgtgggaccaagctcccatgttccggcgtgatgctggccctgcgtccgcaggtg

SEQ ID NO: 96 - DNA, 80 bp, Artificial Sequence
  Description of Artificial Sequence: Synthetic oligonucleotide
  Description of Combined DNA/RNA Molecule: Synthetic oligonucleotide
gatgctcaagaautctgaatacgauaacggtacaaggctaaagcuutgctaacggucgagcaccugcggacgcagggcca

SEQ ID NO: 97 - DNA, 20 bp, Artificial Sequence
  Description of Artificial Sequence: Synthetic primer
gatacagattattagacgta

SEQ ID NO: 98 - DNA, 20 bp, Artificial Sequence
  Description of Artificial Sequence: Synthetic primer
catatcaacaaaaatatttt

SEQ ID NO: 99 - DNA, 153 bp, Artificial Sequence
  Description of Artificial Sequence: Synthetic polynucleotide
catatcaacaaaaatatttttaattaatataaacttgttcttaacctttttgaatggcacatgatattatttttacctgtgtattcaagatgaaatcctgcagcagaaacactgatgtctgattgaaaatttagatacagattattagacgta

SEQ ID NO: 100 - DNA, 80 bp, Artificial Sequence
  Description of Artificial Sequence: Synthetic oligonucleotide
  Description of Combined DNA/RNA Molecule: Synthetic oligonucleotide
gatacagatuattagacgtaacgauaacggtacaaggctaaagcuutgctaacggucgagcatatcaacaaaaauatttt

SEQ ID NO: 101 - DNA, 20 bp, Artificial Sequence
  Description of Artificial Sequence: Synthetic primer
attgttagtcactatagttt

SEQ ID NO: 102 - DNA, 20 bp, Artificial Sequence
  Description of Artificial Sequence: Synthetic primer
ctcgtaagtagataaaactt

SEQ ID NO: 103 - DNA, 153 bp, Artificial Sequence
  Description of Artificial Sequence: Synthetic polynucleotide
aaactatagtgactaacaatctgagtgaaaataataattatgtttttgaaaacccgttttaaattaatcttagaagttctataaactgaaaacactgacctatggctagtatcgtagctacttccctttcctgaagttttatctacttacgag

SEQ ID NO: 104 - DNA, 80 bp, Artificial Sequence
  Description of Artificial Sequence: Synthetic oligonucleotide
  Description of Combined DNA/RNA Molecule: Synthetic oligonucleotide
attgttagucactatagtttacgauaacggtacaaggctaaagcuutgctaacggucgagctcgtaaguagataaaactt

SEQ ID NO: 105 - DNA, 20 bp, Artificial Sequence
  Description of Artificial Sequence: Synthetic primer
ggcagggggaggggcatagg

SEQ ID NO: 106 - DNA, 20 bp, Artificial Sequence
  Description of Artificial Sequence: Synthetic primer
ctcctgctggcgggaggcgg

SEQ ID NO: 107 - DNA, 153 bp, Artificial Sequence
  Description of Artificial Sequence: Synthetic polynucleotide
cctatgcccctccccctgccgtccccggccatcctgccccccagagtgctgaggtgtggggcgggccttctggggcacagcctgggcacagaggtggctgtgcgaagaggggctcggtggcacagcgctcaccccgcctcccgccagcaggag

SEQ ID NO: 108 - DNA, 80 bp, Artificial Sequence
  Description of Artificial Sequence: Synthetic oligonucleotide
  Description of Combined DNA/RNA Molecule: Synthetic oligonucleotide
ggcagggggaggggcauaggacgauaacggtacaaggctaaagcuutgctaacggucgagctcctgcuggcgggaggcgg

SEQ ID NO: 109 - DNA, 20 bp, Artificial Sequence
  Description of Artificial Sequence: Synthetic primer
aggtgaagccaccggcctgg

SEQ ID NO: 110 - DNA, 20 bp, Artificial Sequence
  Description of Artificial Sequence: Synthetic primer
cttcctgcagcagggcacga

SEQ ID NO: 111 - DNA, 153 bp, Artificial Sequence
  Description of Artificial Sequence: Synthetic polynucleotide
cttcctgcagcagggcacgaggaaaggcaggctgggtcagacccgcctccatgagggctctctctgctctgcagtggggctggaagctggtggccaagcacccatttacagagagacccaagggacccccaagaggtgaagccaccggcctgg

SEQ ID NO: 112 - DNA, 80 bp, Artificial Sequence
  Description of Artificial Sequence: Synthetic oligonucleotide
  Description of Combined DNA/RNA Molecule: Synthetic oligonucleotide
aggugaagccaccggcctggacgauaacggtacaaggctaaagcuutgctaacggucgagcttccugcagcagggcacga

SEQ ID NO: 113 - DNA, 20 bp, Artificial Sequence
  Description of Artificial Sequence: Synthetic primer
gcagagagcctgcagttagg

SEQ ID NO: 114 - DNA, 20 bp, Artificial Sequence
  Description of Artificial Sequence: Synthetic primer
cccggtgagcctgggggcca

SEQ ID NO: 115 - DNA, 153 bp, Artificial Sequence
  Description of Artificial Sequence: Synthetic polynucleotide
cccggtgagcctgggggccaccagctggggctgccttagtcctggtgatgttctctttcctcccggcccttcagttcatctggcggtgccttcagggtgaccattcaggcaaacacatggctggatgagaggtgcagagagcctgcagttagg

SEQ ID NO: 116 - DNA, 80 bp, Artificial Sequence
  Description of Artificial Sequence: Synthetic oligonucleotide
  Description of Combined DNA/RNA Molecule: Synthetic oligonucleotide
gcagagagccugcagttaggacgauaacggtacaaggctaaagcuutgctaacggucgagcccggtgagccugggggcca

SEQ ID NO: 117 - DNA, 20 bp, Artificial Sequence
  Description of Artificial Sequence: Synthetic primer
cactaagagctcagtctcaa

SEQ ID NO: 118 - DNA, 20 bp, Artificial Sequence
  Description of Artificial Sequence: Synthetic primer
catctagggaaaaaacatga

SEQ ID NO: 119 - DNA, 153 bp, Artificial Sequence
  Description of Artificial Sequence: Synthetic polynucleotide
ttgagactgagctcttagtgaagtatattctggttttaagtgcttttcgtatgacttggaacatctgcttattttctaatccgctgttttagggtagacactgacaacgttatgtgtggtctttaacctgttgtcatgttttttccctagatg

SEQ ID NO: 120 - DNA, 80 bp, Artificial Sequence
  Description of Artificial Sequence: Synthetic oligonucleotide
  Description of Combined DNA/RNA Molecule: Synthetic oligonucleotide
cactaagagcucagtctcaaacgauaacggtacaaggctaaagcuutgctaacggucgagcatcuagggaaaaaacatga

SEQ ID NO: 121 - DNA, 20 bp, Artificial Sequence
  Description of Artificial Sequence: Synthetic primer
cctctgagcctcggtttccc

SEQ ID NO: 122 - DNA, 20 bp, Artificial Sequence
  Description of Artificial Sequence: Synthetic primer
ccaggtgaggtagggggtgg

SEQ ID NO: 123 - DNA, 153 bp, Artificial Sequence
  Description of Artificial Sequence: Synthetic polynucleotide
ccaggtgaggtagggggtggggaggccaccgccacgtagctgcctcggtgcaggtgttcccaggtggtgcgggcttcagacctcaggcagacctgagttcaccttttgctctttgtgggcaatgcactcttcccctctgagcctcggtttccc

SEQ ID NO: 124 - DNA, 80 bp, Artificial Sequence
  Description of Artificial Sequence: Synthetic oligonucleotide
  Description of Combined DNA/RNA Molecule: Synthetic oligonucleotide
cctctgagccucggtttcccacgauaacggtacaaggctaaagcuutgctaacggucgagccaggtgagguagggggtgg

SEQ ID NO: 125 - DNA, 20 bp, Artificial Sequence
  Description of Artificial Sequence: Synthetic primer
taggtgtgtagatccaagta

SEQ ID NO: 126 - DNA, 20 bp, Artificial Sequence
  Description of Artificial Sequence: Synthetic primer
cttaaacaactacaaggaag

SEQ ID NO: 127 - DNA, 153 bp, Artificial Sequence
  Description of Artificial Sequence: Synthetic polynucleotide
cttaaacaactacaaggaagtattgaagatgaagctatggcttcttctggacagattgatttattagagcgtcttaaaggtagattttaaaaaggtgttttaaaataattttttaagctcaaattgtcatctttaggtgtgtagatccaagta

SEQ ID NO: 128 - DNA, 80 bp, Artificial Sequence
  Description of Artificial Sequence: Synthetic oligonucleotide
  Description of Combined DNA/RNA Molecule: Synthetic oligonucleotide
taggtgtguagatccaagtaacgauaacggtacaaggctaaagcuutgctaacggucgagcttaaacaacuacaaggaag

SEQ ID NO: 129 - DNA, 20 bp, Artificial Sequence
  Description of Artificial Sequence: Synthetic primer
gagacagactgtgaccagta

SEQ ID NO: 130 - DNA, 20 bp, Artificial Sequence
  Description of Artificial Sequence: Synthetic primer
ccgcttctaggacagcgtct

SEQ ID NO: 131 - DNA, 154 bp, Artificial Sequence
  Description of Artificial Sequence: Synthetic polynucleotide
ccgcttctaggacagcgtctaacagcatctttgggaagatgactgtcaccaaagcagaaaaagctttctgacttgtgtaaccccctggagattttttaagtcccccaccccacccctttccctatttcttacaggagacagactgtgaccagta

SEQ ID NO: 132 - DNA, 80 bp, Artificial Sequence
  Description of Artificial Sequence: Synthetic oligonucleotide
  Description of Combined DNA/RNA Molecule: Synthetic oligonucleotide
gagacagacugtgaccagtaacgauaacggtacaaggctaaagcuutgctaacggucgagccgcttcuaggacagcgtct

SEQ ID NO: 133 - DNA, 20 bp, Artificial Sequence
  Description of Artificial Sequence: Synthetic primer
gcctatctataagaggccca

SEQ ID NO: 134 - DNA, 20 bp, Artificial Sequence
  Description of Artificial Sequence: Synthetic primer
caaggtgatcagaagcaggc

SEQ ID NO: 135 - DNA, 154 bp, Artificial Sequence
  Description of Artificial Sequence: Synthetic polynucleotide
tgggcctcttatagataggctccagggactcaaggagtaagttcacagcatcagcctagctccgcagaagctcagctgtaaccacgagcacacaggaggacacgagccagccagggtgctgggtctcacaggtggcctgcttctgatcaccttg

SEQ ID NO: 136 - DNA, 80 bp, Artificial Sequence
  Description of Artificial Sequence: Synthetic oligonucleotide
  Description of Combined DNA/RNA Molecule: Synthetic oligonucleotide
gcctatctauaagaggcccaacgauaacggtacaaggctaaagcuutgctaacggucgagcaaggtgaucagaagcaggc

SEQ ID NO: 137 - DNA, 20 bp, Artificial Sequence
  Description of Artificial Sequence: Synthetic primer
aaatagagaggaagtctgga

SEQ ID NO: 138 - DNA, 20 bp, Artificial Sequence
  Description of Artificial Sequence: Synthetic primer
ctgaggtcagtgccgactct

SEQ ID NO: 139 - DNA, 154 bp, Artificial Sequence
  Description of Artificial Sequence: Synthetic polynucleotide
ctgaggtcagtgccgactctgccacatggcttccaggtctcttactccatgctcccctttatccctcatagcatggacgcattcttacccctttgtgggcctcatttttgttgtgtgttttgttgtagctgggcaaatagagaggaagtctgga

SEQ ID NO: 140 - DNA, 80 bp, Artificial Sequence
  Description of Artificial Sequence: Synthetic oligonucleotide
  Description of Combined DNA/RNA Molecule: Synthetic oligonucleotide
aaatagagaggaaguctggaacgauaacggtacaaggctaaagcuutgctaacggucgagctgaggtcagugccgactct

SEQ ID NO: 141 - DNA, 20 bp, Artificial Sequence
  Description of Artificial Sequence: Synthetic primer
atttacatcgtcacggagta

SEQ ID NO: 142 - DNA, 20 bp, Artificial Sequence
  Description of Artificial Sequence: Synthetic primer
ccaccagggtggccatcaaa

SEQ ID NO: 143 - DNA, 154 bp, Artificial Sequence
  Description of Artificial Sequence: Synthetic polynucleotide
ccaccagggtggccatcaaaaccctgaagcctggcacgatgtctccagaggccttcctgcaggaggcccaggtcatgaagaagctgaggcatgagaagctggtgcagttgtatgctgtggtttcagaggagcccatttacatcgtcacggagta

SEQ ID NO: 144 - DNA, 80 bp, Artificial Sequence
  Description of Artificial Sequence: Synthetic oligonucleotide
  Description of Combined DNA/RNA Molecule: Synthetic oligonucleotide
atttacatcgucacggagtaacgauaacggtacaaggctaaagcuutgctaacggucgagccaccaggguggccatcaaa

SEQ ID NO: 145 - DNA, 20 bp, Artificial Sequence
  Description of Artificial Sequence: Synthetic primer
cagcctcccaagtaattggg

SEQ ID NO: 146 - DNA, 20 bp, Artificial Sequence
  Description of Artificial Sequence: Synthetic primer
ccaaggtaagattttcttct

SEQ ID NO: 147 - DNA, 154 bp, Artificial Sequence
  Description of Artificial Sequence: Synthetic polynucleotide
ccaaggtaagattttcttcttcttgttttgttttttgagataggatctttctctgtcacccaggctggagtgcagtgggattgtcacaactcattgtagccttgacctcctggtttccagcaattctcctgcctcagcctcccaagtaattggg

SEQ ID NO: 148 - DNA, 80 bp, Artificial Sequence
  Description of Artificial Sequence: Synthetic oligonucleotide
  Description of Combined DNA/RNA Molecule: Synthetic oligonucleotide
cagcctcccaaguaattgggacgauaacggtacaaggctaaagcuutgctaacggucgagccaaggtaagautttcttct

SEQ ID NO: 149 - DNA, 20 bp, Artificial Sequence
  Description of Artificial Sequence: Synthetic primer
atttgaactattaagaaatc

SEQ ID NO: 150 - DNA, 20 bp, Artificial Sequence
  Description of Artificial Sequence: Synthetic primer
ccagatctatcagtggatgg

SEQ ID NO: 151 - DNA, 155 bp, Artificial Sequence
  Description of Artificial Sequence: Synthetic polynucleotide
ccagatctatcagtggatggagaaacaaacattattctgtgtatggggcagggctaggaaggctgaaagtgggaagaaaatgatcttagactcctattcatatcttgtgtttagtcctccttgaatcctctcctaatttgaactattaagaaatc

SEQ ID NO: 152 - DNA, 80 bp, Artificial Sequence
  Description of Artificial Sequence: Synthetic oligonucleotide
  Description of Combined DNA/RNA Molecule: Synthetic oligonucleotide
atttgaacuattaagaaatcacgauaacggtacaaggctaaagcuutgctaacggucgagccagatctaucagtggatgg

SEQ ID NO: 153 - DNA, 20 bp, Artificial Sequence
  Description of Artificial Sequence: Synthetic primer
gggtcggcattctggctgta

SEQ ID NO: 154 - DNA, 20 bp, Artificial Sequence
  Description of Artificial Sequence: Synthetic primer
ccgtgggtcattctggatgt

SEQ ID NO: 155 - DNA, 155 bp, Artificial Sequence
  Description of Artificial Sequence: Synthetic polynucleotide
ccgtgggtcattctggatgtcctgccagcgggcgtagccgtgcctgggtggggcaccattaagggcaaacctggccgttagaagtggtggggccgtagggggaggcagctcagggagggggaggggccagcccgggggtcggcattctggctgta

SEQ ID NO: 156 - DNA, 80 bp, Artificial Sequence
  Description of Artificial Sequence: Synthetic oligonucleotide
  Description of Combined DNA/RNA Molecule: Synthetic oligonucleotide
gggtcggcautctggctgtaacgauaacggtacaaggctaaagcuutgctaacggucgagccgtgggtcautctggatgt

SEQ ID NO: 157 - DNA, 20 bp, Artificial Sequence
  Description of Artificial Sequence: Synthetic primer
tgagtatatttttgtcttta

SEQ ID NO: 158 - DNA, 20 bp, Artificial Sequence
  Description of Artificial Sequence: Synthetic primer
ctcaggtgagcttgtgtgaa

SEQ ID NO: 159 - DNA, 155 bp, Artificial Sequence
  Description of Artificial Sequence: Synthetic polynucleotide
taaagacaaaaatatactcagacatactctgtttctacaaatttattcattttgagtaaatctgtaaagctaatagttgctaccactgggaaccaggagctaataaaaataacttctttctctggaaaagagtaattcacacaagctcacctgag

SEQ ID NO: 160 - DNA, 80 bp, Artificial Sequence
  Description of Artificial Sequence: Synthetic oligonucleotide
  Description of Combined DNA/RNA Molecule: Synthetic oligonucleotide
tgagtatatutttgtctttaacgauaacggtacaaggctaaagcuutgctaacggucgagctcaggtgagcutgtgtgaa

SEQ ID NO: 161 - DNA, 20 bp, Artificial Sequence
  Description of Artificial Sequence: Synthetic primer
acttaccatcatagtatgta

SEQ ID NO: 162 - DNA, 20 bp, Artificial Sequence
  Description of Artificial Sequence: Synthetic primer
ccatgttaatgtcttcttgt

SEQ ID NO: 163 - DNA, 155 bp, Artificial Sequence
  Description of Artificial Sequence: Synthetic polynucleotide
ccatgttaatgtcttcttgttcctctaggtcagcctgccagtatactggggggcagccatagtgaaggactgttgcagatagcatcagggcctcagccaggacagcagcagaatggatttactggtcagccagctacttaccatcatagtatgta

SEQ ID NO: 164 - DNA, 80 bp, Artificial Sequence
  Description of Artificial Sequence: Synthetic oligonucleotide
  Description of Combined DNA/RNA Molecule: Synthetic oligonucleotide
acttaccaucatagtatgtaacgauaacggtacaaggctaaagcuutgctaacggucgagccatgttaaugtcttcttgt

SEQ ID NO: 165 - DNA, 20 bp, Artificial Sequence
  Description of Artificial Sequence: Synthetic primer
gtcatatttattctccagct

SEQ ID NO: 166 - DNA, 20 bp, Artificial Sequence
  Description of Artificial Sequence: Synthetic primer
cctcttctgcaaaaacaaaa

SEQ ID NO: 167 - DNA, 156 bp, Artificial Sequence
  Description of Artificial Sequence: Synthetic polynucleotide
agctggagaataaatatgacttctaattatgagaatgtcagtcatttagttttagaaacaaaatctttatagatgcttagtagaggtggcttagtgagacttttgagctcttaatctgtgaaccttctgatactaattttgtttttgcagaagagg

SEQ ID NO: 168 - DNA, 80 bp, Artificial Sequence
  Description of Artificial Sequence: Synthetic oligonucleotide
  Description of Combined DNA/RNA Molecule: Synthetic oligonucleotide
gtcatattuattctccagctacgauaacggtacaaggctaaagcuutgctaacggucgagcctcttcugcaaaaacaaaa

SEQ ID NO: 169 - DNA, 20 bp, Artificial Sequence
  Description of Artificial Sequence: Synthetic primer
tcttgcagctaagaatgatt

SEQ ID NO: 170 - DNA, 20 bp, Artificial Sequence
  Description of Artificial Sequence: Synthetic primer
ctgtgaggtgagactctcct

SEQ ID NO: 171 - DNA, 156 bp, Artificial Sequence
  Description of Artificial Sequence: Synthetic polynucleotide
ctgtgaggtgagactctccttttctcttggaagtctttataaaaacttgctgaatggtaaaaagccttctgtaaagagatcttaaaagtccaattatcacaccataaattgaactgtaaagacctgggatcccatgtcttgcagctaagaatgatt

SEQ ID NO: 172 - DNA, 80 bp, Artificial Sequence
  Description of Artificial Sequence: Synthetic oligonucleotide
  Description of Combined DNA/RNA Molecule: Synthetic oligonucleotide
tcttgcagcuaagaatgattacgauaacggtacaaggctaaagcuutgctaacggucgagctgtgaggugagactctcct

SEQ ID NO: 173 - DNA, 20 bp, Artificial Sequence
  Description of Artificial Sequence: Synthetic primer
tcccaggagtatgggtttgg

SEQ ID NO: 174 - DNA, 20 bp, Artificial Sequence
  Description of Artificial Sequence: Synthetic primer
caatggctaaagtgaagagg

SEQ ID NO: 175 - DNA, 156 bp, Artificial Sequence
  Description of Artificial Sequence: Synthetic polynucleotide
ccaaacccatactcctgggaacatgtccttcatgtgaggggtgagggggtggaggggggacttgtaggattgttgggagaggcaggattgctgggtttgggggatgtgctatggaccacagtaataattttgttttcctcttcactttagccattg

SEQ ID NO: 176 - DNA, 80 bp, Artificial Sequence
  Description of Artificial Sequence: Synthetic oligonucleotide
  Description of Combined DNA/RNA Molecule: Synthetic oligonucleotide
tcccaggaguatgggtttggacgauaacggtacaaggctaaagcuutgctaacggucgagcaatggcuaaagtgaagagg

SEQ ID NO: 177 - DNA, 20 bp, Artificial Sequence
  Description of Artificial Sequence: Synthetic primer
acgttctcccgtctgcagag

SEQ ID NO: 178 - DNA, 20 bp, Artificial Sequence
  Description of Artificial Sequence: Synthetic primer
cttcaaggtgagttacatgt

SEQ ID NO: 179 - DNA, 156 bp, Artificial Sequence
  Description of Artificial Sequence: Synthetic polynucleotide
cttcaaggtgagttacatgtttttagatcaatgtttttattgatttgtgtgcactttgaattttggggaagtgagcccctgtgtgactgtgatctatatcaggaaacgctggggctgggtggagtctggggcatgcacgttctcccgtctgcagag

SEQ ID NO: 180 - DNA, 80 bp, Artificial Sequence
  Description of Artificial Sequence: Synthetic oligonucleotide
  Description of Combined DNA/RNA Molecule: Synthetic oligonucleotide
acgttctcccguctgcagagacgauaacggtacaaggctaaagcuutgctaacggucgagcttcaaggugagttacatgt

SEQ ID NO: 181 - DNA, 20 bp, Artificial Sequence
  Description of Artificial Sequence: Synthetic primer
caaaagggaccaagcctttg

SEQ ID NO: 182 - DNA, 20 bp, Artificial Sequence
  Description of Artificial Sequence: Synthetic primer
cttccaggtaaaatggcaaa

SEQ ID NO: 183 - DNA, 156 bp, Artificial Sequence
  Description of Artificial Sequence: Synthetic polynucleotide
cttccaggtaaaatggcaaataatctggggggggtgtaacaccgaggggtgggttgctgaccccttcctacccatcactgtcactgtgaacaccctgaacagagtgcctgcaaattaaagcaaccagtttctgagacaaaagggaccaagcctttg

SEQ ID NO: 184 - DNA, 80 bp, Artificial Sequence
  Description of Artificial Sequence: Synthetic oligonucleotide
  Description of Combined DNA/RNA Molecule: Synthetic oligonucleotide
caaaagggaccaagccuttgacgauaacggtacaaggctaaagcuutgctaacggucgagcttccagguaaaatggcaaa

SEQ ID NO: 185 - DNA, 20 bp, Artificial Sequence
  Description of Artificial Sequence: Synthetic primer
tccttaggatgtattttgta

SEQ ID NO: 186 - DNA, 20 bp, Artificial Sequence
  Description of Artificial Sequence: Synthetic primer
cacattcattgagatttaat

SEQ ID NO: 187 - DNA, 157 bp, Artificial Sequence
  Description of Artificial Sequence: Synthetic polynucleotide
cacattcattgagatttaattatgattttaaatatgtatatttaatatatatgttttttcattttatatgaaaataacagcaacttttttgtgtttgtttgtttttttcttagataagccccaaaagtgatgtttggtccttaggatgtattttgta

SEQ ID NO: 188 - DNA, 80 bp, Artificial Sequence
  Description of Artificial Sequence: Synthetic oligonucleotide
  Description of Combined DNA/RNA Molecule: Synthetic oligonucleotide
tccttaggaugtattttgtaacgauaacggtacaaggctaaagcuutgctaacggucgagcacattcatugagatttaat

SEQ ID NO: 189 - DNA, 20 bp, Artificial Sequence
  Description of Artificial Sequence: Synthetic primer
tgcactgaatagatgtgaag

SEQ ID NO: 190 - DNA, 20 bp, Artificial Sequence
  Description of Artificial Sequence: Synthetic primer
caaggtctctacaacggaag

SEQ ID NO: 191 - DNA, 157 bp, Artificial Sequence
  Description of Artificial Sequence: Synthetic polynucleotide
caaggtctctacaacggaagggaaaaaagtcctttaagatgcggtcttataagaaagggggaaaaatccttaaagatacagtcttagttttacaggaaatattcaccggcccattagaaactaaattactaattcagtgcactgaatagatgtgaag

SEQ ID NO: 192 - DNA, 80 bp, Artificial Sequence
  Description of Artificial Sequence: Synthetic oligonucleotide
  Description of Combined DNA/RNA Molecule: Synthetic oligonucleotide
tgcactgaauagatgtgaagacgauaacggtacaaggctaaagcuutgctaacggucgagcaaggtctcuacaacggaag

SEQ ID NO: 193 - DNA, 20 bp, Artificial Sequence
  Description of Artificial Sequence: Synthetic primer
ctctgaaagtgtttctagta

SEQ ID NO: 194 - DNA, 20 bp, Artificial Sequence
  Description of Artificial Sequence: Synthetic primer
caaagccttgttgaccttta

SEQ ID NO: 195 - DNA, 157 bp, Artificial Sequence
  Description of Artificial Sequence: Synthetic polynucleotide
caaagccttgttgacctttattagagaactgcctctcaaaagacctaaaagacttatttgttcagatcgagactcttcatgagccgatgtgatactctccctctattgctagatcttcgcatcagaagacagcattcctctgaaagtgtttctagta

SEQ ID NO: 196 - DNA, 80 bp, Artificial Sequence
  Description of Artificial Sequence: Synthetic oligonucleotide
  Description of Combined DNA/RNA Molecule: Synthetic oligonucleotide
ctctgaaagugtttctagtaacgauaacggtacaaggctaaagcuutgctaacggucgagcaaagcctugttgaccttta

SEQ ID NO: 197 - DNA, 20 bp, Artificial Sequence
  Description of Artificial Sequence: Synthetic primer
ggtggattgtctgggagagt

SEQ ID NO: 198 - DNA, 20 bp, Artificial Sequence
  Description of Artificial Sequence: Synthetic primer
ctcaacgtggaaaagagaaa

SEQ ID NO: 199 - DNA, 157 bp, Artificial Sequence
  Description of Artificial Sequence: Synthetic polynucleotide
ctcaacgtggaaaagagaaaacagtcaggtgagtgaatcgcttcattcttctcatgttctgtctctgtgggagatgataagttttctctttcagaagagtctgtcctgaaactgcctcgactagtgcgtctgtcagaggtggattgtctgggagagt

SEQ ID NO: 200 - DNA, 80 bp, Artificial Sequence
  Description of Artificial Sequence: Synthetic oligonucleotide
  Description of Combined DNA/RNA Molecule: Synthetic oligonucleotide
ggtggattguctgggagagtacgauaacggtacaaggctaaagcuutgctaacggucgagctcaacguggaaaagagaaa

SEQ ID NO: 201 - DNA, 20 bp, Artificial Sequence
  Description of Artificial Sequence: Synthetic primer
ttttggagacacaggaggta

SEQ ID NO: 202 - DNA, 20 bp, Artificial Sequence
  Description of Artificial Sequence: Synthetic primer
caaacgagatgcctcttcca

SEQ ID NO: 203 - DNA, 157 bp, Artificial Sequence
  Description of Artificial Sequence: Synthetic polynucleotide
caaacgagatgcctcttccaggccttcatgccacatctcatgccagaggatggccactcggatcagctcctcgctcacctgaagccaagagaagaaggagagaagcatcaagaatcagctaacctcagaaaggtctgttttggagacacaggaggta

SEQ ID NO: 204 - DNA, 80 bp, Artificial Sequence
  Description of Artificial Sequence: Synthetic oligonucleotide
  Description of Combined DNA/RNA Molecule: Synthetic oligonucleotide
tttuggagacacaggaggtaacgauaacggtacaaggctaaagcuutgctaacggucgagcaaacgagaugcctcttcca

SEQ ID NO: 205 - DNA, 20 bp, Artificial Sequence
  Description of Artificial Sequence: Synthetic primer
accagatcgagtctatacaa

SEQ ID NO: 206 - DNA, 20 bp, Artificial Sequence
  Description of Artificial Sequence: Synthetic primer
cttgcacctggtagaaaggg

SEQ ID NO: 207 - DNA, 157 bp, Artificial Sequence
  Description of Artificial Sequence: Synthetic polynucleotide
ttgtatagactcgatctggtggatagagctcaatgacttgcaataataattcttcaagattccaagatctgtcagcagacctcatcccagagacttagaaggcaataatgccgtgctatttttaaattttaaattttccctttctaccaggtgcaag

SEQ ID NO: 208 - DNA, 80 bp, Artificial Sequence
  Description of Artificial Sequence: Synthetic oligonucleotide
  Description of Combined DNA/RNA Molecule: Synthetic oligonucleotide
accagatcgaguctatacaaacgauaacggtacaaggctaaagcuutgctaacggucgagcttgcaccuggtagaaaggg

SEQ ID NO: 209 - DNA, 20 bp, Artificial Sequence
  Description of Artificial Sequence: Synthetic primer
taattccatataagggtgta

SEQ ID NO: 210 - DNA, 20 bp, Artificial Sequence
  Description of Artificial Sequence: Synthetic primer
ctcacagatacagatgggta

SEQ ID NO: 211 - DNA, 157 bp, Artificial Sequence
  Description of Artificial Sequence: Synthetic polynucleotide
ctcacagatacagatgggtatgtttgcagaccattggttattctcttgacaaacaatggatttctctccaattaattcaaacccaaactggcattcaaaccttaaaacatcacgattagaaaatccatcgccttctctaattccatataagggtgta

SEQ ID NO: 212 - DNA, 80 bp, Artificial Sequence
  Description of Artificial Sequence: Synthetic oligonucleotide
  Description of Combined DNA/RNA Molecule: Synthetic oligonucleotide
taattccauataagggtgtaacgauaacggtacaaggctaaagcuutgctaacggucgagctcacagauacagatgggta

SEQ ID NO: 213 - DNA, 20 bp, Artificial Sequence
  Description of Artificial Sequence: Synthetic primer
ttagtggtagatctgaggta

SEQ ID NO: 214 - DNA, 20 bp, Artificial Sequence
  Description of Artificial Sequence: Synthetic primer
cagttcttgtgacacaatag

SEQ ID NO: 215 - DNA, 157 bp, Artificial Sequence
  Description of Artificial Sequence: Synthetic polynucleotide
cagttcttgtgacacaatagccaagatttccacagagtaagaaaaaaaaattcattaagaagaatgaaggattcttttgaactttcttggcttgacatgaaagatttgtaacatcttggcttgacatgttacaaatattagtggtagatctgaggta

SEQ ID NO: 216 - DNA, 80 bp, Artificial Sequence
  Description of Artificial Sequence: Synthetic oligonucleotide
  Description of Combined DNA/RNA Molecule: Synthetic oligonucleotide
ttagtgguagatctgaggtaacgauaacggtacaaggctaaagcuutgctaacggucgagcagttcttgugacacaatag

SEQ ID NO: 217 - DNA, 20 bp, Artificial Sequence
  Description of Artificial Sequence: Synthetic primer
gacatcttgcaatgaaaagt

SEQ ID NO: 218 - DNA, 20 bp, Artificial Sequence
  Description of Artificial Sequence: Synthetic primer
ccaagcaatctgcaaagaat

SEQ ID NO: 219 - DNA, 158 bp, Artificial Sequence
  Description of Artificial Sequence: Synthetic polynucleotide
ccaagcaatctgcaaagaataccatgcatgtatgaataaaatttacatcaaatagttatattttaaccaatttgtatctttactgtggcaaggagctatgataaatgtttatattttacctttggtaatggatatccagacatcttgcaatgaaaagt

SEQ ID NO: 220 - DNA, 80 bp, Artificial Sequence
  Description of Artificial Sequence: Synthetic oligonucleotide
  Description of Combined DNA/RNA Molecule: Synthetic oligonucleotide
gacatctugcaatgaaaagtacgauaacggtacaaggctaaagcuutgctaacggucgagccaagcaauctgcaaagaat

SEQ ID NO: 221 - DNA, 20 bp, Artificial Sequence
  Description of Artificial Sequence: Synthetic primer
gcttcccacagtttggggga

SEQ ID NO: 222 - DNA, 20 bp, Artificial Sequence
  Description of Artificial Sequence: Synthetic primer
ctactataacttgaaaaaag

SEQ ID NO: 223 - DNA, 158 bp, Artificial Sequence
  Description of Artificial Sequence: Synthetic polynucleotide
ctactataacttgaaaaaagacaagaagatacattagacgtccgttcaaaacactataaataacgagtggaaatactataaaagagtttaagttactcaggctttctataacagcttagactttcagattaattttgtgcttcccacagtttggggga

SEQ ID NO: 224 - DNA, 80 bp, Artificial Sequence
  Description of Artificial Sequence: Synthetic oligonucleotide
  Description of Combined DNA/RNA Molecule: Synthetic oligonucleotide
gcttcccacaguttgggggaacgauaacggtacaaggctaaagcuutgctaacggucgagctactataacutgaaaaaag

SEQ ID NO: 225 - DNA, 20 bp, Artificial Sequence
  Description of Artificial Sequence: Synthetic primer
tggcccaagaaaatggagtc

SEQ ID NO: 226 - DNA, 20 bp, Artificial Sequence
  Description of Artificial Sequence: Synthetic primer
cagccagctcttaggggggg

SEQ ID NO: 227 - DNA, 158 bp, Artificial Sequence
  Description of Artificial Sequence: Synthetic polynucleotide
cagccagctcttagggggggatgagatcattatgtctcatgatggcccaccctgtgcctgcttcagggaatgacagccaggaaaaggggctcttctgtcttcccttcctatgtgggtggtgatgggaagaaaggggtgtggcccaagaaaatggagtc

SEQ ID NO: 228 - DNA, 80 bp, Artificial Sequence
  Description of Artificial Sequence: Synthetic oligonucleotide
  Description of Combined DNA/RNA Molecule: Synthetic oligonucleotide
tggcccaagaaaauggagtcacgauaacggtacaaggctaaagcuutgctaacggucgagcagccagcucttaggggggg

SEQ ID NO: 229 - DNA, 20 bp, Artificial Sequence
  Description of Artificial Sequence: Synthetic primer
aatctctgtgtctttgagcc

SEQ ID NO: 230 - DNA, 20 bp, Artificial Sequence
  Description of Artificial Sequence: Synthetic primer
caaggacaggtaagcgagga

SEQ ID NO: 231 - DNA, 158 bp, Artificial Sequence
  Description of Artificial Sequence: Synthetic polynucleotide
caaggacaggtaagcgaggaggcggggagggcgggggctgtaggggtccccgtgggagcaggcctggcatctgcactctgactctgcacactcaggcttgggccgctcactctttcactcatccacaaacactgactgaatctctgtgtctttgagcc

SEQ ID NO: 232 - DNA, 80 bp, Artificial Sequence
  Description of Artificial Sequence: Synthetic oligonucleotide
  Description of Combined DNA/RNA Molecule: Synthetic oligonucleotide
aatctctgugtctttgagccacgauaacggtacaaggctaaagcuutgctaacggucgagcaaggacagguaagcgagga

SEQ ID NO: 233 - DNA, 20 bp, Artificial Sequence
  Description of Artificial Sequence: Synthetic primer
tcagaggctgcttcactgca

SEQ ID NO: 234 - DNA, 20 bp, Artificial Sequence
  Description of Artificial Sequence: Synthetic primer
cttgagagggtgagtctgcc

SEQ ID NO: 235 - DNA, 158 bp, Artificial Sequence
  Description of Artificial Sequence: Synthetic polynucleotide
cttgagagggtgagtctgccagtggggaaaagcggaaagggaaggagagggttggagccaggataagggagacccctgaatcatggtttcaagacccatggggggacctgcatttagaggatggtgaaacagcggccctcagaggctgcttcactgca

SEQ ID NO: 236 - DNA, 80 bp, Artificial Sequence
  Description of Artificial Sequence: Synthetic oligonucleotide
  Description of Combined DNA/RNA Molecule: Synthetic oligonucleotide
tcagaggcugcttcactgcaacgauaacggtacaaggctaaagcuutgctaacggucgagcttgagagggugagtctgcc

SEQ ID NO: 237 - DNA, 20 bp, Artificial Sequence
  Description of Artificial Sequence: Synthetic primer
taagaattgttctctgtgta

SEQ ID NO: 238 - DNA, 20 bp, Artificial Sequence
  Description of Artificial Sequence: Synthetic primer
cttttactatgttaaaaata

SEQ ID NO: 239 - DNA, 159 bp, Artificial Sequence
  Description of Artificial Sequence: Synthetic polynucleotide
cttttactatgttaaaaataaattagtgcagttttaaaatcctttttctgtatgggattatggaatatttaagttaaattgtaacatttaatacattttgatttttaaaaaatcatgactaataatttttttttttttttaagaattgttctctgtgta

SEQ ID NO: 240 - DNA, 80 bp, Artificial Sequence
  Description of Artificial Sequence: Synthetic oligonucleotide
  Description of Combined DNA/RNA Molecule: Synthetic oligonucleotide
taagaattgutctctgtgtaacgauaacggtacaaggctaaagcuutgctaacggucgagcttttactaugttaaaaata

SEQ ID NO: 241 - DNA, 20 bp, Artificial Sequence
  Description of Artificial Sequence: Synthetic primer
ttgtcctatttaattcccca

SEQ ID NO: 242 - DNA, 20 bp, Artificial Sequence
  Description of Artificial Sequence: Synthetic primer
cagcagctgacagcattcgg

SEQ ID NO: 243 - DNA, 159 bp, Artificial Sequence
  Description of Artificial Sequence: Synthetic polynucleotide
cagcagctgacagcattcggcgtatacctaaggagagttttttccccgaactgacagcaacgattccaaccacggcaagctggcttccaactataacattttactctcaaaggtctccttaaattgggcttgtttttacttgtcctatttaattcccca

SEQ ID NO: 244 - DNA, 80 bp, Artificial Sequence
  Description of Artificial Sequence: Synthetic oligonucleotide
  Description of Combined DNA/RNA Molecule: Synthetic oligonucleotide
ttgtcctatutaattccccaacgauaacggtacaaggctaaagcuutgctaacggucgagcagcagcugacagcattcgg

SEQ ID NO: 245 - DNA, 20 bp, Artificial Sequence
  Description of Artificial Sequence: Synthetic primer
caccctctgcccagcacttc

SEQ ID NO: 246 - DNA, 20 bp, Artificial Sequence
  Description of Artificial Sequence: Synthetic primer
catgactatagtaagagggg

SEQ ID NO: 247 - DNA, 159 bp, Artificial Sequence
  Description of Artificial Sequence: Synthetic polynucleotide
catgactatagtaagaggggctggtggcacggcctggctaggcccccaggaaatgaggtgctcgctcttcatgggcaagcagcaccctacacacatgcacacctggcatggccctctgtggcccaagccacttcccctccaccctctgcccagcacttc

SEQ ID NO: 248 - DNA, 80 bp, Artificial Sequence
  Description of Artificial Sequence: Synthetic oligonucleotide
  Description of Combined DNA/RNA Molecule: Synthetic oligonucleotide
caccctcugcccagcacttcacgauaacggtacaaggctaaagcuutgctaacggucgagcatgactauagtaagagggg

SEQ ID NO: 249 - DNA, 20 bp, Artificial Sequence
  Description of Artificial Sequence: Synthetic primer
aaagaactgctttgggagag

SEQ ID NO: 250 - DNA, 20 bp, Artificial Sequence
  Description of Artificial Sequence: Synthetic primer
catgaataatgtaagtcttg

SEQ ID NO: 251 - DNA, 159 bp, Artificial Sequence
  Description of Artificial Sequence: Synthetic polynucleotide
catgaataatgtaagtcttgggatctccattctcatgtcttggtggattctgttctgcaatcgtgttgctcttttggaagcatagatagcaggaaaagagaacagaccaggtgtttaccaaagagagtcaggtgaaaccaaagaactgctttgggagag

SEQ ID NO: 252 - DNA, 80 bp, Artificial Sequence
  Description of Artificial Sequence: Synthetic oligonucleotide
  Description of Combined DNA/RNA Molecule: Synthetic oligonucleotide
aaagaactgcuttgggagagacgauaacggtacaaggctaaagcuutgctaacggucgagcatgaataaugtaagtcttg

SEQ ID NO: 253 - DNA, 20 bp, Artificial Sequence
  Description of Artificial Sequence: Synthetic primer
ctggaaatcttccattttta

SEQ ID NO: 254 - DNA, 20 bp, Artificial Sequence
  Description of Artificial Sequence: Synthetic primer
cttcctcctccagctggtta

SEQ ID NO: 255 - DNA, 159 bp, Artificial Sequence
  Description of Artificial Sequence: Synthetic polynucleotide
taaaaatggaagatttccagatggctggtcattaacacttttcatagttcgatcttcagtttgcatgtggaaaccagtcataccacccaaaggtgttggagtagctgtcagctttcgagctggagttcgaataggaacataaccagctggaggaggaag

SEQ ID NO: 256 - DNA, 80 bp, Artificial Sequence
  Description of Artificial Sequence: Synthetic oligonucleotide
  Description of Combined DNA/RNA Molecule: Synthetic oligonucleotide
ctggaaatcutccatttttaacgauaacggtacaaggctaaagcuutgctaacggucgagcttcctccuccagctggtta

SEQ ID NO: 257 - DNA, 20 bp, Artificial Sequence
  Description of Artificial Sequence: Synthetic primer
aacatgatctttaagaggcc

SEQ ID NO: 258 - DNA, 20 bp, Artificial Sequence
  Description of Artificial Sequence: Synthetic primer
cagcttcacctagagaaaga

SEQ ID NO: 259 - DNA, 159 bp, Artificial Sequence
  Description of Artificial Sequence: Synthetic polynucleotide
ggcctcttaaagatcatgtttgttacagtgcttaaaaattaatatgttcatctgcaaaatggaataaaaaatctgttaaaaatatatttcactaaatagtttaagatgagtcatatttgtgggttttcattttaaattttctttctctaggtgaagctg

SEQ ID NO: 260 - DNA, 80 bp, Artificial Sequence
  Description of Artificial Sequence: Synthetic oligonucleotide
  Description of Combined DNA/RNA Molecule: Synthetic oligonucleotide
aacatgatcuttaagaggccacgauaacggtacaaggctaaagcuutgctaacggucgagcagcttcaccuagagaaaga

SEQ ID NO: 261 - DNA, 20 bp, Artificial Sequence
  Description of Artificial Sequence: Synthetic primer
aggcaggcacacaaatccag

SEQ ID NO: 262 - DNA, 20 bp, Artificial Sequence
  Description of Artificial Sequence: Synthetic primer
ccatcgatgtctacatgatc

SEQ ID NO: 263 - DNA, 159 bp, Artificial Sequence
  Description of Artificial Sequence: Synthetic polynucleotide
ccatcgatgtctacatgatcatggtcaagtgtgagtgactggtgggtctgtccacactgcctagctgagccttggtggctgctcttagccaaacagctgaggcctttgcatccctggagaaatgtcatcacattacttaaggcaggcacacaaatccag

SEQ ID NO: 264 - DNA, 80 bp, Artificial Sequence
  Description of Artificial Sequence: Synthetic oligonucleotide
  Description of Combined DNA/RNA Molecule: Synthetic oligonucleotide
aggcaggcacacaaauccagacgauaacggtacaaggctaaagcuutgctaacggucgagccatcgatguctacatgatc

SEQ ID NO: 265 - DNA, 20 bp, Artificial Sequence
  Description of Artificial Sequence: Synthetic primer
tataggggagggtcttggag

SEQ ID NO: 266 - DNA, 20 bp, Artificial Sequence
  Description of Artificial Sequence: Synthetic primer
cgtcacagagtaagtgaacc

SEQ ID NO: 267 - DNA, 159 bp, Artificial Sequence
  Description of Artificial Sequence: Synthetic polynucleotide
ctccaagaccctcccctatatcacatccagagccaattctcttcccttacttccaacatgtccctgccccacatacaaactctctccagacaactatgagtcccccatctcccagaagcctcctccttaaaaggccccaggttcacttactctgtgacg

SEQ ID NO: 268 - DNA, 80 bp, Artificial Sequence
  Description of Artificial Sequence: Synthetic oligonucleotide
  Description of Combined DNA/RNA Molecule: Synthetic oligonucleotide
tataggggagggucttggagacgauaacggtacaaggctaaagcuutgctaacggucgagcgtcacagaguaagtgaacc

SEQ ID NO: 269 - DNA, 20 bp, Artificial Sequence
  Description of Artificial Sequence: Synthetic primer
caaccaggaagaggtgtgtt

SEQ ID NO: 270 - DNA, 20 bp, Artificial Sequence
  Description of Artificial Sequence: Synthetic primer
cggctctcctggtgagtgcg

SEQ ID NO: 271 - DNA, 160 bp, Artificial Sequence
  Description of Artificial Sequence: Synthetic polynucleotide
cggctctcctggtgagtgcgggcgtgtggagctcacagtgctgtctgtggagaggtcagaaaggaattcaagtcagaaattcttgagaaggattagatttgccatgtgggaagaggcagtagacagacaaatgcaccttacaaccaggaagaggtgtgtt

SEQ ID NO: 272 - DNA, 80 bp, Artificial Sequence
  Description of Artificial Sequence: Synthetic oligonucleotide
  Description of Combined DNA/RNA Molecule: Synthetic oligonucleotide
caaccaggaagaggugtgttacgauaacggtacaaggctaaagcuutgctaacggucgagcggctctccuggtgagtgcg

SEQ ID NO: 273 - DNA, 20 bp, Artificial Sequence
  Description of Artificial Sequence: Synthetic primer
gtaatcccagcactttggga

SEQ ID NO: 274 - DNA, 20 bp, Artificial Sequence
  Description of Artificial Sequence: Synthetic primer
cttcatggcatctgagaaaa

SEQ ID NO: 275 - DNA, 160 bp, Artificial Sequence
  Description of Artificial Sequence: Synthetic polynucleotide
cttcatggcatctgagaaaatatattttacaattttatcaatattgtggttttaaattggaggctactataaaaattacctaagtgctaaaaatatttaccattaagagttaatcaggccaggcgcagtggctcatgcctgtaatcccagcactttggga

SEQ ID NO: 276 - DNA, 80 bp, Artificial Sequence
  Description of Artificial Sequence: Synthetic oligonucleotide
  Description of Combined DNA/RNA Molecule: Synthetic oligonucleotide
gtaatcccagcacuttgggaacgauaacggtacaaggctaaagcuutgctaacggucgagcttcatggcauctgagaaaa

SEQ ID NO: 277 - DNA, 20 bp, Artificial Sequence
  Description of Artificial Sequence: Synthetic primer
tctctccttttcctgctggg

SEQ ID NO: 278 - DNA, 20 bp, Artificial Sequence
  Description of Artificial Sequence: Synthetic primer
cagacctgaaggtaggagaa

SEQ ID NO: 279 - DNA, 160 bp, Artificial Sequence
  Description of Artificial Sequence: Synthetic polynucleotide
cagacctgaaggtaggagaagggaaggtgggaagagatgatgtgggggagttagacttatattatgtgttggctttttgccatcctaggtaacaaagccacttgaccaggtcccttctacctagagcagtaacctcttcctctctccttttcctgctggg

SEQ ID NO: 280 - DNA, 80 bp, Artificial Sequence
  Description of Artificial Sequence: Synthetic oligonucleotide
  Description of Combined DNA/RNA Molecule: Synthetic oligonucleotide
tctctccttutcctgctgggacgauaacggtacaaggctaaagcuutgctaacggucgagcagaccugaaggtaggagaa

SEQ ID NO: 281 - DNA, 20 bp, Artificial Sequence
  Description of Artificial Sequence: Synthetic primer
atggaacacgaattccaatt

SEQ ID NO: 282 - DNA, 20 bp, Artificial Sequence
  Description of Artificial Sequence: Synthetic primer
cgtaggcaaggtaagcttgt

SEQ ID NO: 283 - DNA, 160 bp, Artificial Sequence
  Description of Artificial Sequence: Synthetic polynucleotide
aattggaattcgtgttccataaacaaaaatcctttagggagatttaaagaatcagatttataaaaatgatggtttgatgaccttcaaattttcatcagtaaaatatataaagagcaaatataaacacgtgccattttaacacaagcttaccttgcctacg

SEQ ID NO: 284 - DNA, 80 bp, Artificial Sequence
  Description of Artificial Sequence: Synthetic oligonucleotide
  Description of Combined DNA/RNA Molecule: Synthetic oligonucleotide
atggaacacgaautccaattacgauaacggtacaaggctaaagcuutgctaacggucgagcgtaggcaagguaagcttgt

SEQ ID NO: 285 - DNA, 20 bp, Artificial Sequence
  Description of Artificial Sequence: Synthetic primer
gaacaagaacaacctttata

SEQ ID NO: 286 - DNA, 20 bp, Artificial Sequence
  Description of Artificial Sequence: Synthetic primer
cctattcacaggtcagtgtt

SEQ ID NO: 287 - DNA, 160 bp, Artificial Sequence
  Description of Artificial Sequence: Synthetic polynucleotide
cctattcacaggtcagtgttcacatggtgtagtcttgcaaggttttgatgaattaaatgctttaggaataaaatatagtctcactccaaaggaacattgattttcttcctggcatccaggcaggtgacatctattggctggaacaagaacaacctttata

SEQ ID NO: 288 - DNA, 80 bp, Artificial Sequence
  Description of Artificial Sequence: Synthetic oligonucleotide
  Description of Combined DNA/RNA Molecule: Synthetic oligonucleotide
gaacaagaacaaccuttataacgauaacggtacaaggctaaagcuutgctaacggucgagcctattcacaggucagtgtt

SEQ ID NO: 289 - DNA, 20 bp, Artificial Sequence
  Description of Artificial Sequence: Synthetic primer
aagcagacgtcacccaccca

SEQ ID NO: 290 - DNA, 20 bp, Artificial Sequence
  Description of Artificial Sequence: Synthetic primer
caggtccagcctggagtgtg

SEQ ID NO: 291 - DNA, 160 bp, Artificial Sequence
  Description of Artificial Sequence: Synthetic polynucleotide
tgggtgggtgacgtctgcttaggatgcatgtctgtgcccttgaacccggcgcctggcctggaggcgggcgatgcacctcctgccttacctgcctgcagggttccaggtttaacatcctgcgccttctctcctgcctcctccacactccaggctggacctg

SEQ ID NO: 292 - DNA, 80 bp, Artificial Sequence
  Description of Artificial Sequence: Synthetic oligonucleotide
  Description of Combined DNA/RNA Molecule: Synthetic oligonucleotide
aagcagacgucacccacccaacgauaacggtacaaggctaaagcuutgctaacggucgagcaggtccagccuggagtgtg

SEQ ID NO: 293 - DNA, 20 bp, Artificial Sequence
  Description of Artificial Sequence: Synthetic primer
ctctccaccatcctctggta

SEQ ID NO: 294 - DNA, 20 bp, Artificial Sequence
  Description of Artificial Sequence: Synthetic primer
catgtgtattcccacttcat

SEQ ID NO: 295 - DNA, 160 bp, Artificial Sequence
  Description of Artificial Sequence: Synthetic polynucleotide
catgtgtattcccacttcattataggactcttattcatttcttctttagtgtccttatcataagctgagtcttaactgtaagccatttcaaatatgtttttgaagatggaatatgtgaataaacatattttttataccttctctccaccatcctctggta

SEQ ID NO: 296 - DNA, 80 bp, Artificial Sequence
  Description of Artificial Sequence: Synthetic oligonucleotide
  Description of Combined DNA/RNA Molecule: Synthetic oligonucleotide
ctctccaccaucctctggtaacgauaacggtacaaggctaaagcuutgctaacggucgagcatgtgtatucccacttcat

SEQ ID NO: 297 - DNA, 20 bp, Artificial Sequence
  Description of Artificial Sequence: Synthetic primer
ttggattttgcatgaatata

SEQ ID NO: 298 - DNA, 20 bp, Artificial Sequence
  Description of Artificial Sequence: Synthetic primer
cttcttcttcacctgtggga

SEQ ID NO: 299 - DNA, 161 bp, Artificial Sequence
  Description of Artificial Sequence: Synthetic polynucleotide
cttcttcttcacctgtgggaagggaaagatgaatgtttgggagggggcacaatgacccattttaaaagagattctgttaattctgactacaaagtcaaaaagattttctggatatcccaatggagaaaattgcagaaagttttggattttgcatgaatata

SEQ ID NO: 300 - DNA, 80 bp, Artificial Sequence
  Description of Artificial Sequence: Synthetic oligonucleotide
  Description of Combined DNA/RNA Molecule: Synthetic oligonucleotide
ttggatttugcatgaatataacgauaacggtacaaggctaaagcuutgctaacggucgagcttcttctucacctgtggga

SEQ ID NO: 301 - DNA, 20 bp, Artificial Sequence
  Description of Artificial Sequence: Synthetic primer
gaaagggttagttgagacca

SEQ ID NO: 302 - DNA, 20 bp, Artificial Sequence
  Description of Artificial Sequence: Synthetic primer
cgtggcaaagaattctctga

SEQ ID NO: 303 - DNA, 161 bp, Artificial Sequence
  Description of Artificial Sequence: Synthetic polynucleotide
tggtctcaactaaccctttcaggtctaaatggagcccagatggagaaaatacccctattgcatatttcttcatgtgaccaaaatatttcagaaaaagacctattagacacagagaacaaaagaaagaaagattttcttacttcagagaattctttgccacg

SEQ ID NO: 304 - DNA, 80 bp, Artificial Sequence
  Description of Artificial Sequence: Synthetic oligonucleotide
  Description of Combined DNA/RNA Molecule: Synthetic oligonucleotide
gaaagggtuagttgagaccaacgauaacggtacaaggctaaagcuutgctaacggucgagcgtggcaaagaautctctga

SEQ ID NO: 305 - DNA, 20 bp, Artificial Sequence
  Description of Artificial Sequence: Synthetic primer
ctattaggcacagatgacat

SEQ ID NO: 306 - DNA, 20 bp, Artificial Sequence
  Description of Artificial Sequence: Synthetic primer
cacaccacggttctgaggga

SEQ ID NO: 307 - DNA, 161 bp, Artificial Sequence
  Description of Artificial Sequence: Synthetic polynucleotide
cacaccacggttctgagggaaaagtcagtcagtaagtcatcaatgtcgacctgaaactcccctctgtgttcctatccacaccaggaggactcagtcgaaactgaacggaacggcagcctgatcatccttactgtggatattctattaggcacagatgacat

SEQ ID NO: 308 - DNA, 80 bp, Artificial Sequence
  Description of Artificial Sequence: Synthetic oligonucleotide
  Description of Combined DNA/RNA Molecule: Synthetic oligonucleotide
ctattaggcacagaugacatacgauaacggtacaaggctaaagcuutgctaacggucgagcacaccacggutctgaggga

SEQ ID NO: 309 - DNA, 20 bp, Artificial Sequence
  Description of Artificial Sequence: Synthetic primer
caaggccgagttcccaataa

SEQ ID NO: 310 - DNA, 20 bp, Artificial Sequence
  Description of Artificial Sequence: Synthetic primer
ccagttgatgccctgggcgt

SEQ ID NO: 311 - DNA, 161 bp, Artificial Sequence
  Description of Artificial Sequence: Synthetic polynucleotide
ccagttgatgccctgggcgtgagaaagataagcatgtcaggtcatcccccaccatggaacgccccacttcaaaaaaggggtaattatgggaacagggaatccacaatgtggggttagctattttcagctaacatgaagcttcaaggccgagttcccaataa

SEQ ID NO: 312 - DNA, 80 bp, Artificial Sequence
  Description of Artificial Sequence: Synthetic oligonucleotide
  Description of Combined DNA/RNA Molecule: Synthetic oligonucleotide
caaggccgagutcccaataaacgauaacggtacaaggctaaagcuutgctaacggucgagccagttgaugccctgggcgt

SEQ ID NO: 313 - DNA, 20 bp, Artificial Sequence
  Description of Artificial Sequence: Synthetic primer
aagagctagtatgttagtgc

SEQ ID NO: 314 - DNA, 20 bp, Artificial Sequence
  Description of Artificial Sequence: Synthetic primer
cagtcatccagctgcaagag

SEQ ID NO: 315 - DNA, 161 bp, Artificial Sequence
  Description of Artificial Sequence: Synthetic polynucleotide
gcactaacatactagctcttcaagttatgatccacatttcagaacattgcttgattttacaaaacacaggagggcaacatgatgtgatttctccatatgtagtctccatctgaggagcaggttgggtataacaggctctttctcttgcagctggatgactg

SEQ ID NO: 316 - DNA, 80 bp, Artificial Sequence
  Description of Artificial Sequence: Synthetic oligonucleotide
  Description of Combined DNA/RNA Molecule: Synthetic oligonucleotide
aagagctaguatgttagtgcacgauaacggtacaaggctaaagcuutgctaacggucgagcagtcauccagctgcaagag

SEQ ID NO: 317 - DNA, 20 bp, Artificial Sequence
  Description of Artificial Sequence: Synthetic primer
ttagtttagttatctaaact

SEQ ID NO: 318 - DNA, 20 bp, Artificial Sequence
  Description of Artificial Sequence: Synthetic primer
ctcagagtgaaggtatgcgg

SEQ ID NO: 319 - DNA, 162 bp, Artificial Sequence
  Description of Artificial Sequence: Synthetic polynucleotide
agtttagataactaaactaatatagctccaagtttcaggcttttgtttatacagcataagtatgcagttaatgcaaactacaggcttacagcttatctgcaaaacctgagcttttactttagttctgtatattaacataattccgcataccttcactctgag

SEQ ID NO: 320 - DNA, 80 bp, Artificial Sequence
  Description of Artificial Sequence: Synthetic oligonucleotide
  Description of Combined DNA/RNA Molecule: Synthetic oligonucleotide
ttagtttagutatctaaactacgauaacggtacaaggctaaagcuutgctaacggucgagctcagagugaaggtatgcgg

SEQ ID NO: 321 - DNA, 20 bp, Artificial Sequence
  Description of Artificial Sequence: Synthetic primer
gttttcagcataaacagttg

SEQ ID NO: 322 - DNA, 20 bp, Artificial Sequence
  Description of Artificial Sequence: Synthetic primer
catatagatctaggtaagta

SEQ ID NO: 323 - DNA, 162 bp, Artificial Sequence
  Description of Artificial Sequence: Synthetic polynucleotide
catatagatctaggtaagtaataaaatctatgtatctattctttttagtaaatatttggtcatcatggaatgttgtttgcctaccaagatattacaaatataagagacagataaattgaagcagtaaatattgggtttttttgttttcagcataaacagttg

SEQ ID NO: 324 - DNA, 80 bp, Artificial Sequence
  Description of Artificial Sequence: Synthetic oligonucleotide
  Description of Combined DNA/RNA Molecule: Synthetic oligonucleotide
gttttcagcauaaacagttgacgauaacggtacaaggctaaagcuutgctaacggucgagcatatagauctaggtaagta

SEQ ID NO: 325 - DNA, 20 bp, Artificial Sequence
  Description of Artificial Sequence: Synthetic primer
atgaacaacatattgtgctc

SEQ ID NO: 326 - DNA, 20 bp, Artificial Sequence
  Description of Artificial Sequence: Synthetic primer
ctacagtagaaagcttttca

SEQ ID NO: 327 - DNA, 162 bp, Artificial Sequence
  Description of Artificial Sequence: Synthetic polynucleotide
ctacagtagaaagcttttcaaaagaaaaaaaaaatgctgtttaattaatgaatcagaagttattacccaaagtgataaacacctatacagcgactagtgcttaaaagtaggtcagtggtcatctatgtaaattttacttcatatgaacaacatattgtgctc

SEQ ID NO: 328 - DNA, 80 bp, Artificial Sequence
  Description of Artificial Sequence: Synthetic oligonucleotide
  Description of Combined DNA/RNA Molecule: Synthetic oligonucleotide
atgaacaacauattgtgctcacgauaacggtacaaggctaaagcuutgctaacggucgagctacaguagaaagcttttca

SEQ ID NO: 329 - DNA, 20 bp, Artificial Sequence
  Description of Artificial Sequence: Synthetic primer
agccaggagccggctcctct

SEQ ID NO: 330 - DNA, 20 bp, Artificial Sequence
  Description of Artificial Sequence: Synthetic primer
caccttcgtgctggtgagga

SEQ ID NO: 331 - DNA, 162 bp, Artificial Sequence
  Description of Artificial Sequence: Synthetic polynucleotide
caccttcgtgctggtgaggagaggctagggcaccccaccagctctgcttcgggggcacagggaagggagaagccaacctaacgggcaaggggagccctatctccgggccgctgggctgtgcctcctgttcctgcctgtgcagagccaggagccggctcctct

SEQ ID NO: 332 - DNA, 80 bp, Artificial Sequence
  Description of Artificial Sequence: Synthetic oligonucleotide
  Description of Combined DNA/RNA Molecule: Synthetic oligonucleotide
agccaggagccggcucctctacgauaacggtacaaggctaaagcuutgctaacggucgagcaccttcgugctggtgagga

SEQ ID NO: 333 - DNA, 20 bp, Artificial Sequence
  Description of Artificial Sequence: Synthetic primer
ggcctgacgtcctgccccgg

SEQ ID NO: 334 - DNA, 20 bp, Artificial Sequence
  Description of Artificial Sequence: Synthetic primer
cttccaacggatctgcgggc

SEQ ID NO: 335 - DNA, 162 bp, Artificial Sequence
  Description of Artificial Sequence: Synthetic polynucleotide
ccggggcaggacgtcaggcctgtgctctccacccagctgcgctcttccacctggagccttcctggctgctgggcgcagagtgggagattctccccatgtgccgggccacctgctgccccctgccctgattgcccactctggggcccgcagatccgttggaag

SEQ ID NO: 336 - DNA, 80 bp, Artificial Sequence
  Description of Artificial Sequence: Synthetic oligonucleotide
  Description of Combined DNA/RNA Molecule: Synthetic oligonucleotide
ggcctgacgucctgccccggacgauaacggtacaaggctaaagcuutgctaacggucgagcttccaacggauctgcgggc

SEQ ID NO: 337 - DNA, 20 bp, Artificial Sequence
  Description of Artificial Sequence: Synthetic primer
aggatttgtccggaggctcc

SEQ ID NO: 338 - DNA, 20 bp, Artificial Sequence
  Description of Artificial Sequence: Synthetic primer
ccaaccgccaacagtgagcc

SEQ ID NO: 339 - DNA, 162 bp, Artificial Sequence
  Description of Artificial Sequence: Synthetic polynucleotide
ccaaccgccaacagtgagcccagcctggggtgggtggggggatggggagcacagaggcccagccacgaggcccttacagacagctgacccgtgtccccttgctttatacccttcatgccctcaaggttctaccacagtgtccaggatttgtccggaggctcc

SEQ ID NO: 340 - DNA, 80 bp, Artificial Sequence
  Description of Artificial Sequence: Synthetic oligonucleotide
  Description of Combined DNA/RNA Molecule: Synthetic oligonucleotide
aggatttguccggaggctccacgauaacggtacaaggctaaagcuutgctaacggucgagccaaccgccaacagugagcc

SEQ ID NO: 341 - DNA, 20 bp, Artificial Sequence
  Description of Artificial Sequence: Synthetic primer
tcactagttgatttccagta

SEQ ID NO: 342 - DNA, 20 bp, Artificial Sequence
  Description of Artificial Sequence: Synthetic primer
ccttgctctttttcatcaaa

SEQ ID NO: 343 - DNA, 162 bp, Artificial Sequence
  Description of Artificial Sequence: Synthetic polynucleotide
tactggaaatcaactagtgaccttccagggacaacccgaacgtgatgaaaagatcaaagaacctactctattgggttttcatacagctagcgggaaaaaagttaaaattgcaaaggaatctttggacaaagtgaaaaacctttttgatgaaaaagagcaagg

SEQ ID NO: 344 - DNA, 80 bp, Artificial Sequence
  Description of Artificial Sequence: Synthetic oligonucleotide
  Description of Combined DNA/RNA Molecule: Synthetic oligonucleotide
tcactagtugatttccagtaacgauaacggtacaaggctaaagcuutgctaacggucgagccttgctctutttcatcaaa

SEQ ID NO: 345 - DNA, 20 bp, Artificial Sequence
  Description of Artificial Sequence: Synthetic primer
agtaatgcccagccctagta

SEQ ID NO: 346 - DNA, 20 bp, Artificial Sequence
  Description of Artificial Sequence: Synthetic primer
ctgtaacccgaaatattaaa

SEQ ID NO: 347 - DNA, 162 bp, Artificial Sequence
  Description of Artificial Sequence: Synthetic polynucleotide
ctgtaacccgaaatattaaatgtggatattagcttcttggaacaactgaagttgttatttgtttttcttttaggttgtttggtgccaaggcaggtggcaaatctgcctctgcacctaatactgagggtgtgaaatcttcctcagtaatgcccagccctagta

SEQ ID NO: 348 - DNA, 80 bp, Artificial Sequence
  Description of Artificial Sequence: Synthetic oligonucleotide
  Description of Combined DNA/RNA Molecule: Synthetic oligonucleotide
agtaaugcccagccctagtaacgauaacggtacaaggctaaagcuutgctaacggucgagctgtaacccgaaauattaaa

SEQ ID NO: 349 - DNA, 20 bp, Artificial Sequence
  Description of Artificial Sequence: Synthetic primer
gagaactctggacacgagta

SEQ ID NO: 350 - DNA, 20 bp, Artificial Sequence
  Description of Artificial Sequence: Synthetic primer
ccacagcatgcactactacc

SEQ ID NO: 351 - DNA, 162 bp, Artificial Sequence
  Description of Artificial Sequence: Synthetic polynucleotide
ccacagcatgcactactacctgaacaacatctggcccgcccacaccaagtgagtctcgggggtgctcagctcaggggcgtgggtgtgcgtgggtttgctgggtggctggccacagggatgcccgccccacacgcacaacactgagaactctggacacgagta

SEQ ID NO: 352 - DNA, 80 bp, Artificial Sequence
  Description of Artificial Sequence: Synthetic oligonucleotide
  Description of Combined DNA/RNA Molecule: Synthetic oligonucleotide
gagaactcuggacacgagtaacgauaacggtacaaggctaaagcuutgctaacggucgagccacagcaugcactactacc

SEQ ID NO: 353 - DNA, 20 bp, Artificial Sequence
  Description of Artificial Sequence: Synthetic primer
tttttatataatctatagta

SEQ ID NO: 354 - DNA, 20 bp, Artificial Sequence
  Description of Artificial Sequence: Synthetic primer
ctaccttatatccttctggg

SEQ ID NO: 355 - DNA, 163 bp, Artificial Sequence
  Description of Artificial Sequence: Synthetic polynucleotide
ctaccttatatccttctgggaacatagcatctaattcctcatcagaaagtgggcgatttctctcatcaatttctctttcccaccgccaagcctgaagctgttcaggagtcatactcattatgtgacctaccaagaaaagcaaatttttatataatctatagta

SEQ ID NO: 356 - DNA, 80 bp, Artificial Sequence
  Description of Artificial Sequence: Synthetic oligonucleotide
  Description of Combined DNA/RNA Molecule: Synthetic oligonucleotide
tttttatauaatctatagtaacgauaacggtacaaggctaaagcuutgctaacggucgagctaccttauatccttctggg

SEQ ID NO: 357 - DNA, 20 bp, Artificial Sequence
  Description of Artificial Sequence: Synthetic primer
tatctttgtaatttccatat

SEQ ID NO: 358 - DNA, 20 bp, Artificial Sequence
  Description of Artificial Sequence: Synthetic primer
ccaagctatctttggtaaga

SEQ ID NO: 359 - DNA, 163 bp, Artificial Sequence
  Description of Artificial Sequence: Synthetic polynucleotide
ccaagctatctttggtaagataccctggaaggactcaacgcctagcaaccttgaactttcttacttgtgagaaggacatagtggaatcttaaaatttctctgataattcttcttgaaagttttcttatgttacttctgcaaaatatctttgtaatttccatat

SEQ ID NO: 360 - DNA, 80 bp, Artificial Sequence
  Description of Artificial Sequence: Synthetic oligonucleotide
  Description of Combined DNA/RNA Molecule: Synthetic oligonucleotide
tatctttguaatttccatatacgauaacggtacaaggctaaagcuutgctaacggucgagccaagctauctttggtaaga

SEQ ID NO: 361 - DNA, 20 bp, Artificial Sequence
  Description of Artificial Sequence: Synthetic primer
ctcagcagctgggggccccc

SEQ ID NO: 362 - DNA, 20 bp, Artificial Sequence
  Description of Artificial Sequence: Synthetic primer
cagaagccaagctggtgagt

SEQ ID NO: 363 - DNA, 163 bp, Artificial Sequence
  Description of Artificial Sequence: Synthetic polynucleotide
cagaagccaagctggtgagtgtccttgcttgtaaggaaaacccaacctcatctttccttggcagggagattctggagcagtccctagggaggccctgtggggaccccggccccccggacacagcttggcttcccctcgtaggtctcagcagctgggggccccc

SEQ ID NO: 364 - DNA, 80 bp, Artificial Sequence
  Description of Artificial Sequence: Synthetic oligonucleotide
  Description of Combined DNA/RNA Molecule: Synthetic oligonucleotide
ctcagcagcugggggcccccacgauaacggtacaaggctaaagcuutgctaacggucgagcagaagccaagcuggtgagt

SEQ ID NO: 365 - DNA, 20 bp, Artificial Sequence
  Description of Artificial Sequence: Synthetic primer
tctttcctagaatttatata

SEQ ID NO: 366 - DNA, 20 bp, Artificial Sequence
  Description of Artificial Sequence: Synthetic primer
cctggatgcattggtaagag

SEQ ID NO: 367 - DNA, 163 bp, Artificial Sequence
  Description of Artificial Sequence: Synthetic polynucleotide
tatataaattctaggaaagaagtctgtgatagaagaaattttggggagggtttaatgaaaaggaaaacagagacatcatctagaaagaagtagaaatcatctgtgtgcttttgttatgacagtctttgactgaatagctcaacctcttaccaatgcatccagg

SEQ ID NO: 368 - DNA, 80 bp, Artificial Sequence
  Description of Artificial Sequence: Synthetic oligonucleotide
  Description of Combined DNA/RNA Molecule: Synthetic oligonucleotide
tctttccuagaatttatataacgauaacggtacaaggctaaagcuutgctaacggucgagcctggatgcautggtaagag

SEQ ID NO: 369 - DNA, 20 bp, Artificial Sequence
  Description of Artificial Sequence: Synthetic primer
atgggtttagtttgtgacta

SEQ ID NO: 370 - DNA, 20 bp, Artificial Sequence
  Description of Artificial Sequence: Synthetic primer
cctctgttataaaggtaaga

SEQ ID NO: 371 - DNA, 163 bp, Artificial Sequence
  Description of Artificial Sequence: Synthetic polynucleotide
cctctgttataaaggtaagaatcgtgatttagaaaaggacaaaggtgtcaatttcatgcaaattttgataaaatatttacaatcccactggatcttcagtagtaactcagctcattgactcagttagttagcatacagtattgatgggtttagtttgtgacta

SEQ ID NO: 372 - DNA, 80 bp, Artificial Sequence
  Description of Artificial Sequence: Synthetic oligonucleotide
  Description of Combined DNA/RNA Molecule: Synthetic oligonucleotide
atgggtttaguttgtgactaacgauaacggtacaaggctaaagcuutgctaacggucgagcctctgttauaaaggtaaga

SEQ ID NO: 373 - DNA, 20 bp, Artificial Sequence
  Description of Artificial Sequence: Synthetic primer
cctgggccctttctgagcct

SEQ ID NO: 374 - DNA, 20 bp, Artificial Sequence
  Description of Artificial Sequence: Synthetic primer
ccgttccaggtccctgttga

SEQ ID NO: 375 - DNA, 163 bp, Artificial Sequence
  Description of Artificial Sequence: Synthetic polynucleotide
aggctcagaaagggcccaggctttgactgggtttgtcacatggctgtggaggccacagctgacactggcgcccaggtgggcagatcctggatccctgtgtggtaggagttggggggctccactgagtcagcctgcatccctcctcaacagggacctggaacgg

SEQ ID NO: 376 - DNA, 80 bp, Artificial Sequence
  Description of Artificial Sequence: Synthetic oligonucleotide
  Description of Combined DNA/RNA Molecule: Synthetic oligonucleotide
cctgggcccuttctgagcctacgauaacggtacaaggctaaagcuutgctaacggucgagccgttccagguccctgttga

SEQ ID NO: 377 - DNA, 20 bp, Artificial Sequence
  Description of Artificial Sequence: Synthetic primer
gtgatctcagctcactgcaa

SEQ ID NO: 378 - DNA, 20 bp, Artificial Sequence
  Description of Artificial Sequence: Synthetic primer
cagtcagagccaacctagga

SEQ ID NO: 379 - DNA, 163 bp, Artificial Sequence
  Description of Artificial Sequence: Synthetic polynucleotide
cagtcagagccaacctaggagataacacaggcccaagatgaggccagtgcgccttggggagacctgtggcaagcaggggaggccttttttttttttttttgagatggaatctcgctctgtcgcccaggctggagtgcagtggcgtgatctcagctcactgcaa

SEQ ID NO: 380 - DNA, 80 bp, Artificial Sequence
  Description of Artificial Sequence: Synthetic oligonucleotide
  Description of Combined DNA/RNA Molecule: Synthetic oligonucleotide
gtgatctcagcucactgcaaacgauaacggtacaaggctaaagcuutgctaacggucgagcagtcagagccaaccuagga

SEQ ID NO: 381 - DNA, 20 bp, Artificial Sequence
  Description of Artificial Sequence: Synthetic primer
agagctgccctgacctttct

SEQ ID NO: 382 - DNA, 20 bp, Artificial Sequence
  Description of Artificial Sequence: Synthetic primer
cacggcgcggcaaggtgggc

SEQ ID NO: 383 - DNA, 163 bp, Artificial Sequence
  Description of Artificial Sequence: Synthetic polynucleotide
cacggcgcggcaaggtgggcaggggctgtgtggtatgtcgcgcttggcctgggacaggtcacgtcccgctctgagccccagttttttcctcagctgtcattcctcatggtgcttatctaacagagcggtcatgacaggaggtcagagctgccctgacctttct

SEQ ID NO: 384 - DNA, 80 bp, Artificial Sequence
  Description of Artificial Sequence: Synthetic oligonucleotide
  Description of Combined DNA/RNA Molecule: Synthetic oligonucleotide
agagctgcccugacctttctacgauaacggtacaaggctaaagcuutgctaacggucgagcacggcgcggcaaggugggc

SEQ ID NO: 385 - DNA, 20 bp, Artificial Sequence
  Description of Artificial Sequence: Synthetic primer
gaacctgggcccaggcctaa

SEQ ID NO: 386 - DNA, 20 bp, Artificial Sequence
  Description of Artificial Sequence: Synthetic primer
cacggggatagaggtgagcc

SEQ ID NO: 387 - DNA, 163 bp, Artificial Sequence
  Description of Artificial Sequence: Synthetic polynucleotide
ttaggcctgggcccaggttcagtcccttatagttcagtgcaaaacttaattttaatattaaaatttttctcatgccctatatgcttcataaacaaaagtgtctctcaattctttagcccctttttccaagagaagaagcatatggctcacctctatccccgtg

SEQ ID NO: 388 - DNA, 80 bp, Artificial Sequence
  Description of Artificial Sequence: Synthetic oligonucleotide
  Description of Combined DNA/RNA Molecule: Synthetic oligonucleotide
gaaccugggcccaggcctaaacgauaacggtacaaggctaaagcuutgctaacggucgagcacggggauagaggtgagcc

SEQ ID NO: 389 - DNA, 20 bp, Artificial Sequence
  Description of Artificial Sequence: Synthetic primer
tttgctaatctgactaggta

SEQ ID NO: 390 - DNA, 20 bp, Artificial Sequence
  Description of Artificial Sequence: Synthetic primer
cctgaagatggggtatccag

SEQ ID NO: 391 - DNA, 163 bp, Artificial Sequence
  Description of Artificial Sequence: Synthetic polynucleotide
cctgaagatggggtatccaggtatatgtcttcagaagaatcagaacctcgtctacttggttgaggggagaaaccaggttggaaagtaacttcttcatcttcacaaagagagtcagataaattaggaacttctaaaaaattatctttgctaatctgactaggta

SEQ ID NO: 392 - DNA, 80 bp, Artificial Sequence
  Description of Artificial Sequence: Synthetic oligonucleotide
  Description of Combined DNA/RNA Molecule: Synthetic oligonucleotide
tttgctaauctgactaggtaacgauaacggtacaaggctaaagcuutgctaacggucgagcctgaagauggggtatccag

SEQ ID NO: 393 - DNA, 20 bp, Artificial Sequence
  Description of Artificial Sequence: Synthetic primer
tgtctaagaataagcacttt

SEQ ID NO: 394 - DNA, 20 bp, Artificial Sequence
  Description of Artificial Sequence: Synthetic primer
cagaagcagagcatctaaag

SEQ ID NO: 395 - DNA, 164 bp, Artificial Sequence
  Description of Artificial Sequence: Synthetic polynucleotide
aaagtgcttattcttagacacttgtaaaaggacattttctgttgattatgaacctctaactttgttttaaaagtatgccacatcccaagtgttttatgtatttatttattttcctagagtaagccagggcttttgttttcttccctttagatgctctgcttctg

SEQ ID NO: 396 - DNA, 80 bp, Artificial Sequence
  Description of Artificial Sequence: Synthetic oligonucleotide
  Description of Combined DNA/RNA Molecule: Synthetic oligonucleotide
tgtctaagaauaagcactttacgauaacggtacaaggctaaagcuutgctaacggucgagcagaagcagagcauctaaag

SEQ ID NO: 397 - DNA, 20 bp, Artificial Sequence
  Description of Artificial Sequence: Synthetic primer
ttataaacagatgtaattac

SEQ ID NO: 398 - DNA, 20 bp, Artificial Sequence
  Description of Artificial Sequence: Synthetic primer
cactcagcttgacgtcttgg

SEQ ID NO: 399 - DNA, 164 bp, Artificial Sequence
  Description of Artificial Sequence: Synthetic polynucleotide
cactcagcttgacgtcttggataaagtaaggatggcttgtaaaactcattttagaaatcataatgcttatcaataagccaccttttaataatggggtccagttatcaggggaacccactaaaattattttacacaaacatcaatttataaacagatgtaattac

SEQ ID NO: 400 - DNA, 80 bp, Artificial Sequence
  Description of Artificial Sequence: Synthetic oligonucleotide
  Description of Combined DNA/RNA Molecule: Synthetic oligonucleotide
ttataaacagaugtaattacacgauaacggtacaaggctaaagcuutgctaacggucgagcactcagctugacgtcttgg

SEQ ID NO: 401 - DNA, 20 bp, Artificial Sequence
  Description of Artificial Sequence: Synthetic primer
aaggagggaaagaggacgta

SEQ ID NO: 402 - DNA, 20 bp, Artificial Sequence
  Description of Artificial Sequence: Synthetic primer
cgcggccctccggagctgct

SEQ ID NO: 403 - DNA, 164 bp, Artificial Sequence
  Description of Artificial Sequence: Synthetic polynucleotide
cgcggccctccggagctgctcctcaatgaccaacgcctgctccagcagctgggggcggggcgcagcgtcggcccggcccctcccgctgaatggctaccctccgtgctccaccagcgcccaccccaggccaaggctcccggcagaaaggagggaaagaggacgta

SEQ ID NO: 404 - DNA, 80 bp, Artificial Sequence
  Description of Artificial Sequence: Synthetic oligonucleotide
  Description of Combined DNA/RNA Molecule: Synthetic oligonucleotide
aaggagggaaagaggacguaacgauaacggtacaaggctaaagcuutgctaacggucgagcgcggcccuccggagctgct

SEQ ID NO: 405 - DNA, 20 bp, Artificial Sequence
  Description of Artificial Sequence: Synthetic primer
tccccagtgtcatgtgcaag

SEQ ID NO: 406 - DNA, 20 bp, Artificial Sequence
  Description of Artificial Sequence: Synthetic primer
cgccacgatgcagaggtgag

SEQ ID NO: 407 - DNA, 164 bp, Artificial Sequence
  Description of Artificial Sequence: Synthetic polynucleotide
cgccacgatgcagaggtgagccttgcggaggggccgccgccccaaatgccaccgacaggcgcatcctccctgacatccacacacgtgtggcctgattttcgcaattgcagatgaaaacctgaagcttgccattgttaatttacttccccagtgtcatgtgcaag

SEQ ID NO: 408 - DNA, 80 bp, Artificial Sequence
  Description of Artificial Sequence: Synthetic oligonucleotide
  Description of Combined DNA/RNA Molecule: Synthetic oligonucleotide
tccccagtgucatgtgcaagacgauaacggtacaaggctaaagcuutgctaacggucgagcgccacgaugcagaggtgag

SEQ ID NO: 409 - DNA, 20 bp, Artificial Sequence
  Description of Artificial Sequence: Synthetic primer
agtaagacagtaaataagta

SEQ ID NO: 410 - DNA, 20 bp, Artificial Sequence
  Description of Artificial Sequence: Synthetic primer
ctgttagcagaaatctggac

SEQ ID NO: 411 - DNA, 164 bp, Artificial Sequence
  Description of Artificial Sequence: Synthetic polynucleotide
tacttatttactgtcttactaatcttcctaagactttttaaagtgaatatttttaaggcagttctagaagaatgaaaactcttatgatatctgtaatagaattgaatacatatttaactactaaatcaatatatttattaatttgtccagatttctgctaacag

SEQ ID NO: 412 - DNA, 80 bp, Artificial Sequence
  Description of Artificial Sequence: Synthetic oligonucleotide
  Description of Combined DNA/RNA Molecule: Synthetic oligonucleotide
agtaagacaguaaataagtaacgauaacggtacaaggctaaagcuutgctaacggucgagctgttagcagaaauctggac

SEQ ID NO: 413 - DNA, 20 bp, Artificial Sequence
  Description of Artificial Sequence: Synthetic primer
gaacagtcatccccgctgta

SEQ ID NO: 414 - DNA, 20 bp, Artificial Sequence
  Description of Artificial Sequence: Synthetic primer
ccgttggcacatctcccctt

SEQ ID NO: 415 - DNA, 164 bp, Artificial Sequence
  Description of Artificial Sequence: Synthetic polynucleotide
ccgttggcacatctccccttccccgaacagtccccagggcacctcagttccctgcagtcctcgccagtgtagggctcttcacagacacactccccgtccacgcagagcccccgggagctgcagtctgttgggcaccggagttcggaacagtcatccccgctgta

SEQ ID NO: 416 - DNA, 80 bp, Artificial Sequence
  Description of Artificial Sequence: Synthetic oligonucleotide
  Description of Combined DNA/RNA Molecule: Synthetic oligonucleotide
gaacagtcauccccgctgtaacgauaacggtacaaggctaaagcuutgctaacggucgagccgttggcacauctcccctt

SEQ ID NO: 417 - DNA, 20 bp, Artificial Sequence
  Description of Artificial Sequence: Synthetic primer
ttaattcataatgacttgaa

SEQ ID NO: 418 - DNA, 20 bp, Artificial Sequence
  Description of Artificial Sequence: Synthetic primer
cttgcactaactgctgtgtt

SEQ ID NO: 419 - DNA, 165 bp, Artificial Sequence
  Description of Artificial Sequence: Synthetic polynucleotide
cttgcactaactgctgtgttgggtcattgtatgattctgtaaataacaaaaaaaaaaaaaaaaaaaaaaaaaaaaaaaaagagaagagagggaaaacaaacttcagtgatttcattttcatcagaccaagcatatatacatgtaattaattcataatgacttgaa

SEQ ID NO: 420 - DNA, 80 bp, Artificial Sequence
  Description of Artificial Sequence: Synthetic oligonucleotide
  Description of Combined DNA/RNA Molecule: Synthetic oligonucleotide
ttaattcauaatgacttgaaacgauaacggtacaaggctaaagcuutgctaacggucgagcttgcacuaactgctgtgtt

SEQ ID NO: 421 - DNA, 20 bp, Artificial Sequence
  Description of Artificial Sequence: Synthetic primer
tacataatttcacttacgta

SEQ ID NO: 422 - DNA, 20 bp, Artificial Sequence
  Description of Artificial Sequence: Synthetic primer
catcataaaggtcaatctta

SEQ ID NO: 423 - DNA, 165 bp, Artificial Sequence
  Description of Artificial Sequence: Synthetic polynucleotide
catcataaaggtcaatcttatttggagttctactattatcaacccatggtgaagctaaaaaaaaaaaaaaaagagagatattaaatcaaaatattagatatgctctaaaaataatgagactttaaaaatcacaaaaagcaatagatacataatttcacttacgta

SEQ ID NO: 424 - DNA, 80 bp, Artificial Sequence
  Description of Artificial Sequence: Synthetic oligonucleotide
  Description of Combined DNA/RNA Molecule: Synthetic oligonucleotide
tacataattucacttacgtaacgauaacggtacaaggctaaagcuutgctaacggucgagcatcataaaggucaatctta

SEQ ID NO: 425 - DNA, 20 bp, Artificial Sequence
  Description of Artificial Sequence: Synthetic primer
ctgcccgcaatgtgctggtg

SEQ ID NO: 426 - DNA, 20 bp, Artificial Sequence
  Description of Artificial Sequence: Synthetic primer
cttggcctcccagaaggtgg

SEQ ID NO: 427 - DNA, 165 bp, Artificial Sequence
  Description of Artificial Sequence: Synthetic polynucleotide
cttggcctcccagaaggtgggcagggcggcaggtgtgggtggagtaggctgggccctgccctgagatgctgggagcagcggggagaggtggagaggcttcagccctgcctcccaccccttccccagtgcatccacagggacctggctgcccgcaatgtgctggtg

SEQ ID NO: 428 - DNA, 80 bp, Artificial Sequence
  Description of Artificial Sequence: Synthetic oligonucleotide
  Description of Combined DNA/RNA Molecule: Synthetic oligonucleotide
ctgcccgcaaugtgctggtgacgauaacggtacaaggctaaagcuutgctaacggucgagcttggccucccagaaggtgg

SEQ ID NO: 429 - DNA, 20 bp, Artificial Sequence
  Description of Artificial Sequence: Synthetic primer
gcagggcaatttgcaatttc

SEQ ID NO: 430 - DNA, 20 bp, Artificial Sequence
  Description of Artificial Sequence: Synthetic primer
ctcttgtgcacacaggtggg

SEQ ID NO: 431 - DNA, 165 bp, Artificial Sequence
  Description of Artificial Sequence: Synthetic polynucleotide
gaaattgcaaattgccctgcaagacacagtgagttggaggagcaccccgaaatggagccttagcctccagaacctttctacaagcccgaacaacttcacccagatcttcagccagggttctgacttgacacagcagggagacattcccacctgtgtgcacaagag

SEQ ID NO: 432 - DNA, 80 bp, Artificial Sequence
  Description of Artificial Sequence: Synthetic oligonucleotide
  Description of Combined DNA/RNA Molecule: Synthetic oligonucleotide
gcagggcaauttgcaatttcacgauaacggtacaaggctaaagcuutgctaacggucgagctcttgugcacacaggtggg

SEQ ID NO: 433 - DNA, 20 bp, Artificial Sequence
  Description of Artificial Sequence: Synthetic primer
ccccccccgccaaaaaaaaa

SEQ ID NO: 434 - DNA, 20 bp, Artificial Sequence
  Description of Artificial Sequence: Synthetic primer
ccaagcattgacaacaatga

SEQ ID NO: 435 - DNA, 165 bp, Artificial Sequence
  Description of Artificial Sequence: Synthetic polynucleotide
tttttttttggcggggggggttgttttgtttttttagagttatagtaaatatcccattcatcacttaattggtttttggcttttggatattaaagtcgtaattttgtttctaaactcatttggcccacaggtggaaatggtgtattcattgttgtcaatgcttgg

SEQ ID NO: 436 - DNA, 80 bp, Artificial Sequence
  Description of Artificial Sequence: Synthetic oligonucleotide
  Description of Combined DNA/RNA Molecule: Synthetic oligonucleotide
ccccccccgccaaaaaaaaaacgauaacggtacaaggctaaagcuutgctaacggucgagccaagcatugacaacaatga

SEQ ID NO: 437 - DNA, 20 bp, Artificial Sequence
  Description of Artificial Sequence: Synthetic primer
agacaatactagtggcattc

SEQ ID NO: 438 - DNA, 20 bp, Artificial Sequence
  Description of Artificial Sequence: Synthetic primer
ctcctgggagaatatctgag

SEQ ID NO: 439 - DNA, 165 bp, Artificial Sequence
  Description of Artificial Sequence: Synthetic polynucleotide
gaatgccactagtattgtctgagactcttcctgactgtcccccgactcaagaagggtgagaccaacctccagaagagacgcagggactctggtttcctcacagccactggcaaccctaacttcctgtttctctttgtatttctgcctcagatattctcccaggag

SEQ ID NO: 440 - DNA, 80 bp, Artificial Sequence
  Description of Artificial Sequence: Synthetic oligonucleotide
  Description of Combined DNA/RNA Molecule: Synthetic oligonucleotide
agacaatacuagtggcattcacgauaacggtacaaggctaaagcuutgctaacggucgagctcctgggagaauatctgag

SEQ ID NO: 441 - DNA, 20 bp, Artificial Sequence
  Description of Artificial Sequence: Synthetic primer
catccttgaggagcttgtag

SEQ ID NO: 442 - DNA, 20 bp, Artificial Sequence
  Description of Artificial Sequence: Synthetic primer
ctatggacatgaacaggtaa

SEQ ID NO: 443 - DNA, 165 bp, Artificial Sequence
  Description of Artificial Sequence: Synthetic polynucleotide
ctatggacatgaacaggtaagtctgacagtaggatttccaaaggttaggtgttgcttaagtgtaggcttttgttgaattgtcctagcttcaaagagtttatatttaaaatatatttgaattatttttgccatattctcatcaacccatccttgaggagcttgtag

SEQ ID NO: 444 - DNA, 80 bp, Artificial Sequence
  Description of Artificial Sequence: Synthetic oligonucleotide
  Description of Combined DNA/RNA Molecule: Synthetic oligonucleotide
catcctugaggagcttgtagacgauaacggtacaaggctaaagcuutgctaacggucgagctatggacaugaacaggtaa

SEQ ID NO: 445 - DNA, 20 bp, Artificial Sequence
  Description of Artificial Sequence: Synthetic primer
acgtaaagctacatttggta

SEQ ID NO: 446 - DNA, 20 bp, Artificial Sequence
  Description of Artificial Sequence: Synthetic primer
catcgtggttgaaagatact

SEQ ID NO: 447 - DNA, 165 bp, Artificial Sequence
  Description of Artificial Sequence: Synthetic polynucleotide
catcgtggttgaaagatactatcagaagtgcaaaaacaaacctaaagtgcattttagcattcatttggtgcattggtcagtttatgagatttccctcacagagcaagttaaaacagcaaagcaattgcctcaacttcctttggcaacgtaaagctacatttggta

SEQ ID NO: 448 - DNA, 80 bp, Artificial Sequence
  Description of Artificial Sequence: Synthetic oligonucleotide
  Description of Combined DNA/RNA Molecule: Synthetic oligonucleotide
acgtaaagcuacatttggtaacgauaacggtacaaggctaaagcuutgctaacggucgagcatcgtggtugaaagatact

SEQ ID NO: 449 - DNA, 20 bp, Artificial Sequence
  Description of Artificial Sequence: Synthetic primer
tcttaaaaattagctaggca

SEQ ID NO: 450 - DNA, 20 bp, Artificial Sequence
  Description of Artificial Sequence: Synthetic primer
ccttgttccaatcccaggta

SEQ ID NO: 451 - DNA, 166 bp, Artificial Sequence
  Description of Artificial Sequence: Synthetic polynucleotide
ccttgttccaatcccaggtaaggaagtatatagatttatatttccaaaggttatattagtgtttagcagtatgatccataaaagtagtatatttttttagaccagcctgggcaacaaagcaagaccccatttctacaaaaagtttttcttaaaaattagctaggca

SEQ ID NO: 452 - DNA, 80 bp, Artificial Sequence
  Description of Artificial Sequence: Synthetic oligonucleotide
  Description of Combined DNA/RNA Molecule: Synthetic oligonucleotide
tcttaaaaautagctaggcaacgauaacggtacaaggctaaagcuutgctaacggucgagccttgttccaaucccaggta

SEQ ID NO: 453 - DNA, 20 bp, Artificial Sequence
  Description of Artificial Sequence: Synthetic primer
taaatgttgtcaggaacaaa

SEQ ID NO: 454 - DNA, 20 bp, Artificial Sequence
  Description of Artificial Sequence: Synthetic primer
ccttgttttatgaaaaggta

SEQ ID NO: 455 - DNA, 166 bp, Artificial Sequence
  Description of Artificial Sequence: Synthetic polynucleotide
ccttgttttatgaaaaggtatgttgagttttaatttttaaaatttgttgtccgtatgggaagattaatggcagaatggtcttaaagtcttttactgagtaatagtaattatgattaaatttttattcagttttagaagataatctctaaatgttgtcaggaacaaa

SEQ ID NO: 456 - DNA, 80 bp, Artificial Sequence
  Description of Artificial Sequence: Synthetic oligonucleotide
  Description of Combined DNA/RNA Molecule: Synthetic oligonucleotide
taaatgttgucaggaacaaaacgauaacggtacaaggctaaagcuutgctaacggucgagccttgtttuatgaaaaggta

SEQ ID NO: 457 - DNA, 20 bp, Artificial Sequence
  Description of Artificial Sequence: Synthetic primer
ccttataaacacagttgtgt

SEQ ID NO: 458 - DNA, 20 bp, Artificial Sequence
  Description of Artificial Sequence: Synthetic primer
cttcactgctgccattggtc

SEQ ID NO: 459 - DNA, 166 bp, Artificial Sequence
  Description of Artificial Sequence: Synthetic polynucleotide
cttcactgctgccattggtcagtgagtgtgaagggctggggcagatccgctgtctgttcccagggtcaccctggtatcggcctcctttctccccactctcccgttgcagctatcagcactgcaggcgtgagatgtgtcctaatgaaccttataaacacagttgtgt

SEQ ID NO: 460 - DNA, 80 bp, Artificial Sequence
  Description of Artificial Sequence: Synthetic oligonucleotide
  Description of Combined DNA/RNA Molecule: Synthetic oligonucleotide
ccttauaaacacagttgtgtacgauaacggtacaaggctaaagcuutgctaacggucgagcttcactgcugccattggtc

SEQ ID NO: 461 - DNA, 20 bp, Artificial Sequence
  Description of Artificial Sequence: Synthetic primer
tctgggcatgccatatctac

SEQ ID NO: 462 - DNA, 20 bp, Artificial Sequence
  Description of Artificial Sequence: Synthetic primer
ccacgacacttttagatctg

SEQ ID NO: 463 - DNA, 166 bp, Artificial Sequence
  Description of Artificial Sequence: Synthetic polynucleotide
ccacgacacttttagatctgcgacacaaaagaaaagagatacttcaaccacaaaaatgagtggatttttacaatttacctgcaaacacaatgttaataatactagtgcctacatttcatatttgacttaataacatgatacttttctctgggcatgccatatctac

SEQ ID NO: 464 - DNA, 80 bp, Artificial Sequence
  Description of Artificial Sequence: Synthetic oligonucleotide
  Description of Combined DNA/RNA Molecule: Synthetic oligonucleotide
tctgggcaugccatatctacacgauaacggtacaaggctaaagcuutgctaacggucgagccacgacacutttagatctg

SEQ ID NO: 465 - DNA, 20 bp, Artificial Sequence
  Description of Artificial Sequence: Synthetic primer
taggaatcagtgatcatagg

SEQ ID NO: 466 - DNA, 20 bp, Artificial Sequence
  Description of Artificial Sequence: Synthetic primer
ctctgggcgatatttgcaaa

SEQ ID NO: 467 - DNA, 166 bp, Artificial Sequence
  Description of Artificial Sequence: Synthetic polynucleotide
ctctgggcgatatttgcaaataaggagccatatgaaagtaaggcattacttactttccactgccgtcccctcagcatctacacgcactgtgcctggaactaataggtgcccagtaaatttttgttgaatgaatgagtaatcccatttaggaatcagtgatcatagg

SEQ ID NO: 468 - DNA, 80 bp, Artificial Sequence
  Description of Artificial Sequence: Synthetic oligonucleotide
  Description of Combined DNA/RNA Molecule: Synthetic oligonucleotide
taggaatcagugatcataggacgauaacggtacaaggctaaagcuutgctaacggucgagctctgggcgauatttgcaaa

SEQ ID NO: 469 - DNA, 20 bp, Artificial Sequence
  Description of Artificial Sequence: Synthetic primer
tgtgttgatgtgacagaaga

SEQ ID NO: 470 - DNA, 20 bp, Artificial Sequence
  Description of Artificial Sequence: Synthetic primer
caaagcttccagtcagccta

SEQ ID NO: 471 - DNA, 166 bp, Artificial Sequence
  Description of Artificial Sequence: Synthetic polynucleotide
caaagcttccagtcagcctaaaaagagatggacaaagaagggagagatgggttattaaaacatcctctgcatacaaattataagacagatgtgtttctcaatactttctttgctagaaaaaaaagtcagataaacatagaggagtatgtgttgatgtgacagaaga

SEQ ID NO: 472 - DNA, 80 bp, Artificial Sequence
  Description of Artificial Sequence: Synthetic oligonucleotide
  Description of Combined DNA/RNA Molecule: Synthetic oligonucleotide
tgtgttgaugtgacagaagaacgauaacggtacaaggctaaagcuutgctaacggucgagcaaagctuccagtcagccta

SEQ ID NO: 473 - DNA, 20 bp, Artificial Sequence
  Description of Artificial Sequence: Synthetic primer
atggacccagtttttcaagc

SEQ ID NO: 474 - DNA, 20 bp, Artificial Sequence
  Description of Artificial Sequence: Synthetic primer
cgagcttccgcagttgctgg

SEQ ID NO: 475 - DNA, 166 bp, Artificial Sequence
  Description of Artificial Sequence: Synthetic polynucleotide
gcttgaaaaactgggtccattttgtaggatggtggttcattcctagtgctgggtgtaaacagctgtgtgacacttgcagagtgtgagataattaatttggaacccttggaagtatttttatccttacatttatttattttttcttgccagcaactgcggaagctcg

SEQ ID NO: 476 - DNA, 80 bp, Artificial Sequence
  Description of Artificial Sequence: Synthetic oligonucleotide
  Description of Combined DNA/RNA Molecule: Synthetic oligonucleotide
atggacccaguttttcaagcacgauaacggtacaaggctaaagcuutgctaacggucgagcgagctuccgcagttgctgg

SEQ ID NO: 477 - DNA, 20 bp, Artificial Sequence
  Description of Artificial Sequence: Synthetic primer
ctctgtctcgggcccacatt

SEQ ID NO: 478 - DNA, 20 bp, Artificial Sequence
  Description of Artificial Sequence: Synthetic primer
cgctgcgcccgcggcaaggt

SEQ ID NO: 479 - DNA, 167 bp, Artificial Sequence
  Description of Artificial Sequence: Synthetic polynucleotide
cgctgcgcccgcggcaaggtagggtcagcgggaaaaccgggcactttccacccccataccgaacacggccgacatggacccttcctaggcgggacagacacctctccccggacactgactcttcccagccctgatcaccaccgttccctctgtctcgggcccacatt

SEQ ID NO: 480 - DNA, 80 bp, Artificial Sequence
  Description of Artificial Sequence: Synthetic oligonucleotide
  Description of Combined DNA/RNA Molecule: Synthetic oligonucleotide
ctctgtcucgggcccacattacgauaacggtacaaggctaaagcuutgctaacggucgagcgcugcgcccgcggcaaggt

SEQ ID NO: 481 - DNA, 20 bp, Artificial Sequence
  Description of Artificial Sequence: Synthetic primer
agtatcacaagcataacgta

SEQ ID NO: 482 - DNA, 20 bp, Artificial Sequence
  Description of Artificial Sequence: Synthetic primer
ctcatctggatttagataca

SEQ ID NO: 483 - DNA, 167 bp, Artificial Sequence
  Description of Artificial Sequence: Synthetic polynucleotide
ctcatctggatttagatacacactaaaatccagtagttgcaatatatttaatttctgcttgagattacctttgcactctggctgccttccggtccaactgccattagctaaacatgttctttcttctgagccatgaaggatgtaaccagtatcacaagcataacgta

SEQ ID NO: 484 - DNA, 80 bp, Artificial Sequence
  Description of Artificial Sequence: Synthetic oligonucleotide
  Description of Combined DNA/RNA Molecule: Synthetic oligonucleotide
agtatcacaagcauaacgtaacgauaacggtacaaggctaaagcuutgctaacggucgagctcatctggauttagataca

SEQ ID NO: 485 - DNA, 20 bp, Artificial Sequence
  Description of Artificial Sequence: Synthetic primer
ctatgggcggctgaagggtc

SEQ ID NO: 486 - DNA, 20 bp, Artificial Sequence
  Description of Artificial Sequence: Synthetic primer
caacgtgctgtttgacatgt

SEQ ID NO: 487 - DNA, 167 bp, Artificial Sequence
  Description of Artificial Sequence: Synthetic polynucleotide
caacgtgctgtttgacatgtgcgtctcggcaggcccagagtgcagcggtgggaagggactggacgccctctgggactctgcctgccatgtgggtcactctgctctgtgcactggccgcaggctgaccgtggacgagcacgtctggttctatgggcggctgaagggtc

SEQ ID NO: 488 - DNA, 80 bp, Artificial Sequence
  Description of Artificial Sequence: Synthetic oligonucleotide
  Description of Combined DNA/RNA Molecule: Synthetic oligonucleotide
ctatgggcggcugaagggtcacgauaacggtacaaggctaaagcuutgctaacggucgagcaacgtgcugtttgacatgt

SEQ ID NO: 489 - DNA, 20 bp, Artificial Sequence
  Description of Artificial Sequence: Synthetic primer
gtaaacagaagagctttaat

SEQ ID NO: 490 - DNA, 20 bp, Artificial Sequence
  Description of Artificial Sequence: Synthetic primer
cattacatatggtgattcct

SEQ ID NO: 491 - DNA, 168 bp, Artificial Sequence
  Description of Artificial Sequence: Synthetic polynucleotide
attaaagctcttctgtttactaagtaacaatttaaaggcctttttcacataccaaacctcaatagtcacagaggggaaaaattattgcatttatcttctcttagaaaaatgtataggagtaatccttttatcttgcttctggtcccaaaggaatcaccatatgtaatg

SEQ ID NO: 492 - DNA, 80 bp, Artificial Sequence
  Description of Artificial Sequence: Synthetic oligonucleotide
  Description of Combined DNA/RNA Molecule: Synthetic oligonucleotide
gtaaacagaagagcuttaatacgauaacggtacaaggctaaagcuutgctaacggucgagcattacatauggtgattcct

SEQ ID NO: 493 - DNA, 20 bp, Artificial Sequence
  Description of Artificial Sequence: Synthetic primer
attttaaaaagtaaatctct

SEQ ID NO: 494 - DNA, 20 bp, Artificial Sequence
  Description of Artificial Sequence: Synthetic primer
cattgtagaacaacaggact

SEQ ID NO: 495 - DNA, 168 bp, Artificial Sequence
  Description of Artificial Sequence: Synthetic polynucleotide
agagatttactttttaaaatgtaatataaaatatctaaaagtagtattccaacaatttatatgaatgagaatcttcttttaaaaataagataaactagtttttgccagttttttaaaataacctaagggatttgctttgttttattttagtcctgttgttctacaatg

SEQ ID NO: 496 - DNA, 80 bp, Artificial Sequence
  Description of Artificial Sequence: Synthetic oligonucleotide
  Description of Combined DNA/RNA Molecule: Synthetic oligonucleotide
attttaaaaaguaaatctctacgauaacggtacaaggctaaagcuutgctaacggucgagcattguagaacaacaggact

SEQ ID NO: 497 - DNA, 20 bp, Artificial Sequence
  Description of Artificial Sequence: Synthetic primer
acacggcaatcgactcctca

SEQ ID NO: 498 - DNA, 20 bp, Artificial Sequence
  Description of Artificial Sequence: Synthetic primer
cccctcctcatcttcagcct

SEQ ID NO: 499 - DNA, 168 bp, Artificial Sequence
  Description of Artificial Sequence: Synthetic polynucleotide
tgaggagtcgattgccgtgtgaagggctggtggcacggcacccgcgtgagctacgcgtgccctcagtgcgcttctggattgactggccatgggtgctcacagacatgcacattgtgccaccacattgcagtaacccccatgcttttgtaggctgaagatgaggagggg

SEQ ID NO: 500 - DNA, 80 bp, Artificial Sequence
  Description of Artificial Sequence: Synthetic oligonucleotide
  Description of Combined DNA/RNA Molecule: Synthetic oligonucleotide
acacggcaaucgactcctcaacgauaacggtacaaggctaaagcuutgctaacggucgagcccctcctcaucttcagcct

SEQ ID NO: 501 - DNA, 20 bp, Artificial Sequence
  Description of Artificial Sequence: Synthetic primer
aggctgcttgtctggtgctt

SEQ ID NO: 502 - DNA, 20 bp, Artificial Sequence
  Description of Artificial Sequence: Synthetic primer
cagaccaaatcccatgacct

SEQ ID NO: 503 - DNA, 168 bp, Artificial Sequence
  Description of Artificial Sequence: Synthetic polynucleotide
aagcaccagacaagcagcctaaagatagatctttgtgatctatttcaaattgtgccttcaaagtcatcagctgtaacagtgtaagtccttatgggtagtgaaattctcagttctgagctttgtcgcatcattcattttgtggcttttcaggtcatgggatttggtctg

SEQ ID NO: 504 - DNA, 80 bp, Artificial Sequence
  Description of Artificial Sequence: Synthetic oligonucleotide
  Description of Combined DNA/RNA Molecule: Synthetic oligonucleotide
aggctgctugtctggtgcttacgauaacggtacaaggctaaagcuutgctaacggucgagcagaccaaaucccatgacct

SEQ ID NO: 505 - DNA, 20 bp, Artificial Sequence
  Description of Artificial Sequence: Synthetic primer
acgttcatacatacgtaaac

SEQ ID NO: 506 - DNA, 20 bp, Artificial Sequence
  Description of Artificial Sequence: Synthetic primer
cacagcaattttggatctct

SEQ ID NO: 507 - DNA, 168 bp, Artificial Sequence
  Description of Artificial Sequence: Synthetic polynucleotide
gtttacgtatgtatgaacgtgcctactaggttgcagtgtaacgtgttttttattactgtggattgcaattaaaaaaaaaaaactactgcactaaccctcctccagactgaatatctggcagctctaagaattcttatctctttggtgcagagatccaaaattgctgtg

SEQ ID NO: 508 - DNA, 80 bp, Artificial Sequence
  Description of Artificial Sequence: Synthetic oligonucleotide
  Description of Combined DNA/RNA Molecule: Synthetic oligonucleotide
acgttcauacatacgtaaacacgauaacggtacaaggctaaagcuutgctaacggucgagcacagcaatuttggatctct

SEQ ID NO: 509 - DNA, 20 bp, Artificial Sequence
  Description of Artificial Sequence: Synthetic primer
agcaagcccttcctctgtgg

SEQ ID NO: 510 - DNA, 20 bp, Artificial Sequence
  Description of Artificial Sequence: Synthetic primer
cgacgaaattgaggccgagg

SEQ ID NO: 511 - DNA, 168 bp, Artificial Sequence
  Description of Artificial Sequence: Synthetic polynucleotide
cgacgaaattgaggccgaggtgaggcccctgcagctccatttctgttcatttccttcaattaaatctcctttctctttttgttttctcccaagtattcaactttctttaaaatataagacagtataaaccacgaagcaagcatgtgggagcaagcccttcctctgtgg

SEQ ID NO: 512 - DNA, 80 bp, Artificial Sequence
  Description of Artificial Sequence: Synthetic oligonucleotide
  Description of Combined DNA/RNA Molecule: Synthetic oligonucleotide
agcaagcccutcctctgtggacgauaacggtacaaggctaaagcuutgctaacggucgagcgacgaaatugaggccgagg

SEQ ID NO: 513 - DNA, 20 bp, Artificial Sequence
  Description of Artificial Sequence: Synthetic primer
aaatatgatgcagctatgta

SEQ ID NO: 514 - DNA, 20 bp, Artificial Sequence
  Description of Artificial Sequence: Synthetic primer
cactgtaaaaagcaatacta

SEQ ID NO: 515 - DNA, 168 bp, Artificial Sequence
  Description of Artificial Sequence: Synthetic polynucleotide
cactgtaaaaagcaatactaaactataattttaactggaatttgcatttttccttctattcacaatagtctctaatgcaatgtgcaggagaaagtatcactctgtttaaaaataagacaaatgaggaattcagaattggttccttgagaaatatgatgcagctatgta

SEQ ID NO: 516 - DNA, 80 bp, Artificial Sequence
  Description of Artificial Sequence: Synthetic oligonucleotide
  Description of Combined DNA/RNA Molecule: Synthetic oligonucleotide
aaatatgaugcagctatgtaacgauaacggtacaaggctaaagcuutgctaacggucgagcactguaaaaagcaatacta

SEQ ID NO: 517 - DNA, 20 bp, Artificial Sequence
  Description of Artificial Sequence: Synthetic primer
gcctggcgtaggcagctcac

SEQ ID NO: 518 - DNA, 20 bp, Artificial Sequence
  Description of Artificial Sequence: Synthetic primer
ctttatcttcctggagctgt

SEQ ID NO: 519 - DNA, 168 bp, Artificial Sequence
  Description of Artificial Sequence: Synthetic polynucleotide
gtgagctgcctacgccaggcagctggctgagcaaggcacagggacctgggacgccaagggtccagaaagggggtttccttagctgcagagggtgggacaggtgaaagccctgggcgctggggaatcttgggtccccagacccacactcacagctccaggaagataaag

SEQ ID NO: 520 - DNA, 80 bp, Artificial Sequence
  Description of Artificial Sequence: Synthetic oligonucleotide
  Description of Combined DNA/RNA Molecule: Synthetic oligonucleotide
gcctggcguaggcagctcacacgauaacggtacaaggctaaagcuutgctaacggucgagctttatctucctggagctgt

SEQ ID NO: 521 - DNA, 20 bp, Artificial Sequence
  Description of Artificial Sequence: Synthetic primer
tcaagtggatggcgctggag

SEQ ID NO: 522 - DNA, 20 bp, Artificial Sequence
  Description of Artificial Sequence: Synthetic primer
ccatgcagatgggggcaagg

SEQ ID NO: 523 - DNA, 168 bp, Artificial Sequence
  Description of Artificial Sequence: Synthetic polynucleotide
ccatgcagatgggggcaaggttaggtgaaggaccaaggagcagaggaggctgggtggagtggtgtctagcccatgggagaactctgagtggccacctccccacaacacacagttggaggacttcctcttctgccctcccaggtgcccatcaagtggatggcgctggag

SEQ ID NO: 524 - DNA, 80 bp, Artificial Sequence
  Description of Artificial Sequence: Synthetic oligonucleotide
  Description of Combined DNA/RNA Molecule: Synthetic oligonucleotide
tcaagtggauggcgctggagacgauaacggtacaaggctaaagcuutgctaacggucgagccatgcagaugggggcaagg

SEQ ID NO: 525 - DNA, 20 bp, Artificial Sequence
  Description of Artificial Sequence: Synthetic primer
gtggccctggtggttggacc

SEQ ID NO: 526 - DNA, 20 bp, Artificial Sequence
  Description of Artificial Sequence: Synthetic primer
ctagacatatgtgctaggca

SEQ ID NO: 527 - DNA, 168 bp, Artificial Sequence
  Description of Artificial Sequence: Synthetic polynucleotide
ctagacatatgtgctaggcacttaagagatgagatcaataggaattggccatgggtttgtaagatgtgtaggttggggagacagctgtgagggtatagactcagcaaccagcataaccccaagagataggtcttactcacctgtcagggtggccctggtggttggacc

SEQ ID NO: 528 - DNA, 80 bp, Artificial Sequence
  Description of Artificial Sequence: Synthetic oligonucleotide
  Description of Combined DNA/RNA Molecule: Synthetic oligonucleotide
gtggccctgguggttggaccacgauaacggtacaaggctaaagcuutgctaacggucgagctagacataugtgctaggca

SEQ ID NO: 529 - DNA, 20 bp, Artificial Sequence
  Description of Artificial Sequence: Synthetic primer
ataaatcaaaggttaagatt

SEQ ID NO: 530 - DNA, 20 bp, Artificial Sequence
  Description of Artificial Sequence: Synthetic primer
cctctatgacacagaacgag

SEQ ID NO: 531 - DNA, 169 bp, Artificial Sequence
  Description of Artificial Sequence: Synthetic polynucleotide
cctctatgacacagaacgaggtaagaagaggcacctgctctgctctttagatattcatgtaattgtgttcaaacttcctcagcttatgtgccctttgcttccaataaataaaatctaattctgttttaaaattgtatttaatattccaaataaatcaaaggttaagatt

SEQ ID NO: 532 - DNA, 80 bp, Artificial Sequence
  Description of Artificial Sequence: Synthetic oligonucleotide
  Description of Combined DNA/RNA Molecule: Synthetic oligonucleotide
ataaatcaaaggutaagattacgauaacggtacaaggctaaagcuutgctaacggucgagcctctaugacacagaacgag

SEQ ID NO: 533 - DNA, 20 bp, Artificial Sequence
  Description of Artificial Sequence: Synthetic primer
ttggcacacgcatgcaggtg

SEQ ID NO: 534 - DNA, 20 bp, Artificial Sequence
  Description of Artificial Sequence: Synthetic primer
cctggaagctgtgtgcccag

SEQ ID NO: 535 - DNA, 169 bp, Artificial Sequence
  Description of Artificial Sequence: Synthetic polynucleotide
cctggaagctgtgtgcccaggtgggccgtagggggcggggctccgggccgggtcgcacctgctttgcgggaggctgagctaggggtgtggcctccaggccgtttgggggtggggggtggcttattcccttggagagaaggcggggcttcttggcacacgcatgcaggtg

SEQ ID NO: 536 - DNA, 80 bp, Artificial Sequence
  Description of Artificial Sequence: Synthetic oligonucleotide
  Description of Combined DNA/RNA Molecule: Synthetic oligonucleotide
ttggcacacgcaugcaggtgacgauaacggtacaaggctaaagcuutgctaacggucgagcctggaagcugtgtgcccag

SEQ ID NO: 537 - DNA, 20 bp, Artificial Sequence
  Description of Artificial Sequence: Synthetic primer
gtttagggcagctgagggag

SEQ ID NO: 538 - DNA, 20 bp, Artificial Sequence
  Description of Artificial Sequence: Synthetic primer
cgcccagttggacagcgttc

SEQ ID NO: 539 - DNA, 169 bp, Artificial Sequence
  Description of Artificial Sequence: Synthetic polynucleotide
ctccctcagctgccctaaacacagtttctctgcccactcggagggctgtggccatgttggcctcgcccctgacagccagtggctatgggtttgcacagtgagccattgatgagagaccggcacttgactctcatttccttgttccatcagaacgctgtccaactgggcg

SEQ ID NO: 540 - DNA, 80 bp, Artificial Sequence
  Description of Artificial Sequence: Synthetic oligonucleotide
  Description of Combined DNA/RNA Molecule: Synthetic oligonucleotide
gtttagggcagcugagggagacgauaacggtacaaggctaaagcuutgctaacggucgagcgcccagtuggacagcgttc

SEQ ID NO: 541 - DNA, 20 bp, Artificial Sequence
  Description of Artificial Sequence: Synthetic primer
aatgattattttgactaaaa

SEQ ID NO: 542 - DNA, 20 bp, Artificial Sequence
  Description of Artificial Sequence: Synthetic primer
ctgacttcctttctccagtc

SEQ ID NO: 543 - DNA, 170 bp, Artificial Sequence
  Description of Artificial Sequence: Synthetic polynucleotide
ttttagtcaaaataatcattaccacaacagtcacaaacaatgtaaagcatgtccactattgttacaattttgctgaagcttttggaaacccaggtaggaatacttggtgcatagtaactttcttcccccctgtggaaaattctttcataggactggagaaaggaagtcag

SEQ ID NO: 544 - DNA, 80 bp, Artificial Sequence
  Description of Artificial Sequence: Synthetic oligonucleotide
  Description of Combined DNA/RNA Molecule: Synthetic oligonucleotide
aatgattatuttgactaaaaacgauaacggtacaaggctaaagcuutgctaacggucgagctgacttccuttctccagtc

SEQ ID NO: 545 - DNA, 20 bp, Artificial Sequence
  Description of Artificial Sequence: Synthetic primer
cccatcaggagagctagaag

SEQ ID NO: 546 - DNA, 20 bp, Artificial Sequence
  Description of Artificial Sequence: Synthetic primer
ctcgattggcgatgtcaagg

SEQ ID NO: 547 - DNA, 170 bp, Artificial Sequence
  Description of Artificial Sequence: Synthetic polynucleotide
cttctagctctcctgatgggtggggttgctctgcgcccctgcacggggtctgccccatgacccatcccagggtgggccctgttcctccctcaccccgcggcgtgctccttggcgccctgacccagtctctcccgctgtcttgtcttacagccttgacatcgccaatcgag

SEQ ID NO: 548 - DNA, 80 bp, Artificial Sequence
  Description of Artificial Sequence: Synthetic oligonucleotide
  Description of Combined DNA/RNA Molecule: Synthetic oligonucleotide
cccatcaggagagcuagaagacgauaacggtacaaggctaaagcuutgctaacggucgagctcgatuggcgatgtcaagg

SEQ ID NO: 549 - DNA, 20 bp, Artificial Sequence
  Description of Artificial Sequence: Synthetic primer
gacgatggctcttcggattg

SEQ ID NO: 550 - DNA, 20 bp, Artificial Sequence
  Description of Artificial Sequence: Synthetic primer
caaggggcccaactgcattg

SEQ ID NO: 551 - DNA, 170 bp, Artificial Sequence
  Description of Artificial Sequence: Synthetic polynucleotide
caaggggcccaactgcattgagtgagtagggagcaggggtgggtgggctaagttctgagcgggatggggacgttggctgttgtggagccgttggctgctgcggagccgttggtgggtagagtgagagggagcctgccaagatgtcagggtgacgatggctcttcggattg

SEQ ID NO: 552 - DNA, 80 bp, Artificial Sequence
  Description of Artificial Sequence: Synthetic oligonucleotide
  Description of Combined DNA/RNA Molecule: Synthetic oligonucleotide
gacgatggcucttcggattgacgauaacggtacaaggctaaagcuutgctaacggucgagcaaggggcccaacugcattg

SEQ ID NO: 553 - DNA, 20 bp, Artificial Sequence
  Description of Artificial Sequence: Synthetic primer
agcatgaaattttgatttac

SEQ ID NO: 554 - DNA, 20 bp, Artificial Sequence
  Description of Artificial Sequence: Synthetic primer
cacagaactagacacatctt

SEQ ID NO: 555 - DNA, 170 bp, Artificial Sequence
  Description of Artificial Sequence: Synthetic polynucleotide
gtaaatcaaaatttcatgctataatacaaattatttgaggggccacatttcttttcattctagccttcaaagctgtgcctgttgtgtctgtgtccaaagcaagctatcttcttagggaaggggaagaattcacagtgacgtgcacaataaaagatgtgtctagttctgtg

SEQ ID NO: 556 - DNA, 80 bp, Artificial Sequence
  Description of Artificial Sequence: Synthetic oligonucleotide
  Description of Combined DNA/RNA Molecule: Synthetic oligonucleotide
agcatgaaautttgatttacacgauaacggtacaaggctaaagcuutgctaacggucgagcacagaacuagacacatctt

SEQ ID NO: 557 - DNA, 20 bp, Artificial Sequence
  Description of Artificial Sequence: Synthetic primer
tcaaaaaattatttttgtat

SEQ ID NO: 558 - DNA, 20 bp, Artificial Sequence
  Description of Artificial Sequence: Synthetic primer
cctttacgaattgcggcatt

SEQ ID NO: 559 - DNA, 171 bp, Artificial Sequence
  Description of Artificial Sequence: Synthetic polynucleotide
cctttacgaattgcggcattaagtaagttaatgaaaatctacggggtataaaagtgaaaggagactgaccacaggaggtctatagaaaaaaaaagtggccttttgttgttgtctaatttttatgactttttgtagtctttttaagatgggatcaaaaaattatttttgtat

SEQ ID NO: 560 - DNA, 80 bp, Artificial Sequence
  Description of Artificial Sequence: Synthetic oligonucleotide
  Description of Combined DNA/RNA Molecule: Synthetic oligonucleotide
tcaaaaaatuatttttgtatacgauaacggtacaaggctaaagcuutgctaacggucgagcctttacgaautgcggcatt

SEQ ID NO: 561 - DNA, 20 bp, Artificial Sequence
  Description of Artificial Sequence: Synthetic primer
atttttaaaaagaaggagaa

SEQ ID NO: 562 - DNA, 20 bp, Artificial Sequence
  Description of Artificial Sequence: Synthetic primer
cataatacccttacatggct

SEQ ID NO: 563 - DNA, 171 bp, Artificial Sequence
  Description of Artificial Sequence: Synthetic polynucleotide
ttctccttctttttaaaaatatatcttacagagaagaaaatcacgatattcagaccttgactttgaggtaagtttatatgaattattttagaattgtaattacttgaattcaaaatagatatatagttacttaaaaattattactctatgcagccatgtaagggtattatg

SEQ ID NO: 564 - DNA, 80 bp, Artificial Sequence
  Description of Artificial Sequence: Synthetic oligonucleotide
  Description of Combined DNA/RNA Molecule: Synthetic oligonucleotide
attttuaaaaagaaggagaaacgauaacggtacaaggctaaagcuutgctaacggucgagcataatacccutacatggct

SEQ ID NO: 565 - DNA, 20 bp, Artificial Sequence
  Description of Artificial Sequence: Synthetic primer
gccaatcaacaggcgcctcg

SEQ ID NO: 566 - DNA, 20 bp, Artificial Sequence
  Description of Artificial Sequence: Synthetic primer
cagggtgctctgtcgcgaca

SEQ ID NO: 567 - DNA, 171 bp, Artificial Sequence
  Description of Artificial Sequence: Synthetic polynucleotide
cgaggcgcctgttgattggccactggggcccgggttcctccggcggagcgcgcctccccccagatttcccgccagcaggagccgcgcggtagatgcggtgcttttaggagctccgtccgacagaacggttgggccttgccggctgtcggtatgtcgcgacagagcaccctg

SEQ ID NO: 568 - DNA, 80 bp, Artificial Sequence
  Description of Artificial Sequence: Synthetic oligonucleotide
  Description of Combined DNA/RNA Molecule: Synthetic oligonucleotide
gccaaucaacaggcgcctcgacgauaacggtacaaggctaaagcuutgctaacggucgagcagggtgcuctgtcgcgaca

SEQ ID NO: 569 - DNA, 20 bp, Artificial Sequence
  Description of Artificial Sequence: Synthetic primer
gctggggaataaaatccacc

SEQ ID NO: 570 - DNA, 20 bp, Artificial Sequence
  Description of Artificial Sequence: Synthetic primer
ctgcaggattgtgccttgca

SEQ ID NO: 571 - DNA, 171 bp, Artificial Sequence
  Description of Artificial Sequence: Synthetic polynucleotide
ggtggattttattccccagccagacgatcctgcagccttgctggttaccgagctctttgctaacagacttgtttcagggtatgcgccggccacaggcgttagcagagcggagtggggtggctgacgcagcccgtctcatctccccggcagctgcaaggcacaatcctgcag

SEQ ID NO: 572 - DNA, 80 bp, Artificial Sequence
  Description of Artificial Sequence: Synthetic oligonucleotide
  Description of Combined DNA/RNA Molecule: Synthetic oligonucleotide
gctggggaauaaaatccaccacgauaacggtacaaggctaaagcuutgctaacggucgagctgcaggatugtgccttgca

SEQ ID NO: 573 - DNA, 20 bp, Artificial Sequence
  Description of Artificial Sequence: Synthetic primer
cccttcctctttggtggcat

SEQ ID NO: 574 - DNA, 20 bp, Artificial Sequence
  Description of Artificial Sequence: Synthetic primer
ccagcccggggagaacctct

SEQ ID NO: 575 - DNA, 171 bp, Artificial Sequence
  Description of Artificial Sequence: Synthetic polynucleotide
ccagcccggggagaacctctaggcacaggcgggcccagaccggcttctcggcttggatcctgggctgggtggcccctgtctcggggcttgccccactctgcctgcctgctgttggtcctctctctgtggggctgaattgccaggggcgaggcccttcctctttggtggcat

SEQ ID NO: 576 - DNA, 80 bp, Artificial Sequence
  Description of Artificial Sequence: Synthetic oligonucleotide
  Description of Combined DNA/RNA Molecule: Synthetic oligonucleotide
cccttcctcuttggtggcatacgauaacggtacaaggctaaagcuutgctaacggucgagccagcccggggagaaccuct

SEQ ID NO: 577 - DNA, 20 bp, Artificial Sequence
  Description of Artificial Sequence: Synthetic primer
tcggtaacctggctcactag

SEQ ID NO: 578 - DNA, 20 bp, Artificial Sequence
  Description of Artificial Sequence: Synthetic primer
cttgtggttgcgaatgcgct

SEQ ID NO: 579 - DNA, 171 bp, Artificial Sequence
  Description of Artificial Sequence: Synthetic polynucleotide
ctagtgagccaggttaccgaggctggcgcttcggccacatcctcataggcacgaggaatcctagcccgtggggtctccagcacacagccaggcctgcgggcaggcgaggcggggtcctgaggtaagacctgctcctcccgtccactgcaggagcgcattcgcaaccacaag

SEQ ID NO: 580 - DNA, 80 bp, Artificial Sequence
  Description of Artificial Sequence: Synthetic oligonucleotide
  Description of Combined DNA/RNA Molecule: Synthetic oligonucleotide
tcggtaaccuggctcactagacgauaacggtacaaggctaaagcuutgctaacggucgagcttgtggtugcgaatgcgct

SEQ ID NO: 581 - DNA, 20 bp, Artificial Sequence
  Description of Artificial Sequence: Synthetic primer
ttccagagctgtctatgtat

SEQ ID NO: 582 - DNA, 20 bp, Artificial Sequence
  Description of Artificial Sequence: Synthetic primer
ccttcattttctgaatgtgc

SEQ ID NO: 583 - DNA, 171 bp, Artificial Sequence
  Description of Artificial Sequence: Synthetic polynucleotide
atacatagacagctctggaacattccagtcataaagaaatacttaccttgatggaaaatttgtaattaatatttcttgtagaacttccactttgatgagtgactagtgactataactgctatttctttctattttcatggttaatttcagggcacattcagaaaatgaagg

SEQ ID NO: 584 - DNA, 80 bp, Artificial Sequence
  Description of Artificial Sequence: Synthetic oligonucleotide
  Description of Combined DNA/RNA Molecule: Synthetic oligonucleotide
ttccagagcugtctatgtatacgauaacggtacaaggctaaagcuutgctaacggucgagccttcatttuctgaatgtgc

SEQ ID NO: 585 - DNA, 20 bp, Artificial Sequence
  Description of Artificial Sequence: Synthetic primer
gctgaattatttataaccaa

SEQ ID NO: 586 - DNA, 20 bp, Artificial Sequence
  Description of Artificial Sequence: Synthetic primer
ctgctgagcttctcgtgaaa

SEQ ID NO: 587 - DNA, 171 bp, Artificial Sequence
  Description of Artificial Sequence: Synthetic polynucleotide
ttggttataaataattcagcctccagtagacccttctgtagtttaagagctgcatctacctctgcccatagctttttctggactcctttcccaatttgctggagatgtcctctgggggagcagaggattggcaggtccccagcagcctacctttcacgagaagctcagcag

SEQ ID NO: 588 - DNA, 80 bp, Artificial Sequence
  Description of Artificial Sequence: Synthetic oligonucleotide
  Description of Combined DNA/RNA Molecule: Synthetic oligonucleotide
gctgaattauttataaccaaacgauaacggtacaaggctaaagcuutgctaacggucgagctgctgagcutctcgtgaaa

SEQ ID NO: 589 - DNA, 20 bp, Artificial Sequence
  Description of Artificial Sequence: Synthetic primer
tatttcgggatgatggtcaa

SEQ ID NO: 590 - DNA, 20 bp, Artificial Sequence
  Description of Artificial Sequence: Synthetic primer
ctggatacagaagatggcct

SEQ ID NO: 591 - DNA, 171 bp, Artificial Sequence
  Description of Artificial Sequence: Synthetic polynucleotide
ctggatacagaagatggcctccctgaaatttaattgatgcaaattagtattgtgtggttgatgcaatgggatgaaaccttggcagtgagagttggaggttctgcttcaccttgttcctactctgctttcaaacatgcagatgaaaaaattctatttcgggatgatggtcaa

SEQ ID NO: 592 - DNA, 80 bp, Artificial Sequence
  Description of Artificial Sequence: Synthetic oligonucleotide
  Description of Combined DNA/RNA Molecule: Synthetic oligonucleotide
tatttcgggaugatggtcaaacgauaacggtacaaggctaaagcuutgctaacggucgagctggauacagaagatggcct

SEQ ID NO: 593 - DNA, 20 bp, Artificial Sequence
  Description of Artificial Sequence: Synthetic primer
gtggtagggttttcatcttc

SEQ ID NO: 594 - DNA, 20 bp, Artificial Sequence
  Description of Artificial Sequence: Synthetic primer
cctttataaaagcaaattgt

SEQ ID NO: 595 - DNA, 171 bp, Artificial Sequence
  Description of Artificial Sequence: Synthetic polynucleotide
cctttataaaagcaaattgtttgtaagtataggcgttcagaattgtaagtctaaaggtaacacaattgcagtctttttgtaggtagagaagaattgttcattgtcttcagtttaacctcccaatctgtcctgaaatgttcaagtctgaattgtggtagggttttcatcttc

SEQ ID NO: 596 - DNA, 80 bp, Artificial Sequence
  Description of Artificial Sequence: Synthetic oligonucleotide
  Description of Combined DNA/RNA Molecule: Synthetic oligonucleotide
gtggtagggutttcatcttcacgauaacggtacaaggctaaagcuutgctaacggucgagcctttauaaaagcaaattgt

SEQ ID NO: 597 - DNA, 20 bp, Artificial Sequence
  Description of Artificial Sequence: Synthetic primer
gaaaccattcagtggctgta

SEQ ID NO: 598 - DNA, 20 bp, Artificial Sequence
  Description of Artificial Sequence: Synthetic primer
cttaaagtatgaaaatcttg

SEQ ID NO: 599 - DNA, 171 bp, Artificial Sequence
  Description of Artificial Sequence: Synthetic polynucleotide
cttaaagtatgaaaatcttgatcagcattatgatcactgaagattatatttctatatacatctataatgtctcctttttctcttgttttctgtagctttgggccagattatgttgtatgtggatggaatgaatggagtaataaaccgcaatgaaaccattcagtggctgta

SEQ ID NO: 600 - DNA, 80 bp, Artificial Sequence
  Description of Artificial Sequence: Synthetic oligonucleotide
  Description of Combined DNA/RNA Molecule: Synthetic oligonucleotide
gaaaccatucagtggctgtaacgauaacggtacaaggctaaagcuutgctaacggucgagcttaaagtaugaaaatcttg

SEQ ID NO: 601 - DNA, 20 bp, Artificial Sequence
  Description of Artificial Sequence: Synthetic primer
ccatggaactgttcaaggta

SEQ ID NO: 602 - DNA, 20 bp, Artificial Sequence
  Description of Artificial Sequence: Synthetic primer
ctacgctgatgcatttgatt

SEQ ID NO: 603 - DNA, 171 bp, Artificial Sequence
  Description of Artificial Sequence: Synthetic polynucleotide
ctacgctgatgcatttgattcctattgtgaagagagtgatgaggaggaagaagaaatagcgttagaaagaccagagaaagaaatcaggaatgagggatcccagcctgcttacagaacaaaccaacaggtatgtaatgctccctgtcggaagccatggaactgttcaaggta

SEQ ID NO: 604 - DNA, 80 bp, Artificial Sequence
  Description of Artificial Sequence: Synthetic oligonucleotide
  Description of Combined DNA/RNA Molecule: Synthetic oligonucleotide
ccatggaacugttcaaggtaacgauaacggtacaaggctaaagcuutgctaacggucgagctacgctgaugcatttgatt

SEQ ID NO: 605 - DNA, 20 bp, Artificial Sequence
  Description of Artificial Sequence: Synthetic primer
atgaaaaagagaaaagtgta

SEQ ID NO: 606 - DNA, 20 bp, Artificial Sequence
  Description of Artificial Sequence: Synthetic primer
ctactaagtgtcagtccgcg

SEQ ID NO: 607 - DNA, 171 bp, Artificial Sequence
  Description of Artificial Sequence: Synthetic polynucleotide
ctactaagtgtcagtccgcgcatagatgcaccagtaaaagcacctagtagatgagtcgttttatcttttccatcataaatctgcaaaatatatttataattaaaatgtaaatgtgccaataataatcaattcagagcatgtatttgtatctatgaaaaagagaaaagtgta

SEQ ID NO: 608 - DNA, 80 bp, Artificial Sequence
  Description of Artificial Sequence: Synthetic oligonucleotide
  Description of Combined DNA/RNA Molecule: Synthetic oligonucleotide
atgaaaaagagaaaagugtaacgauaacggtacaaggctaaagcuutgctaacggucgagctactaagugtcagtccgcg

SEQ ID NO: 609 - DNA, 20 bp, Artificial Sequence
  Description of Artificial Sequence: Synthetic primer
tttttcacaggtagggttga

SEQ ID NO: 610 - DNA, 20 bp, Artificial Sequence
  Description of Artificial Sequence: Synthetic primer
catccggggacacaatggca

SEQ ID NO: 611 - DNA, 171 bp, Artificial Sequence
  Description of Artificial Sequence: Synthetic polynucleotide
catccggggacacaatggcaagatctacccatacctcgtcatgaacgacgcctgcctcacagagtcacggcgagaggagcgtgtgttgcagctgctgcgtctgctgaacccctgtttggagaagagaaaggagaccaccaagaggcacttgtttttcacaggtagggttga

SEQ ID NO: 612 - DNA, 80 bp, Artificial Sequence
  Description of Artificial Sequence: Synthetic oligonucleotide
  Description of Combined DNA/RNA Molecule: Synthetic oligonucleotide
tttttcacagguagggttgaacgauaacggtacaaggctaaagcuutgctaacggucgagcatccggggacacaauggca

SEQ ID NO: 613 - DNA, 20 bp, Artificial Sequence
  Description of Artificial Sequence: Synthetic primer
gtggatgacatcactgagta

SEQ ID NO: 614 - DNA, 20 bp, Artificial Sequence
  Description of Artificial Sequence: Synthetic primer
ccagaggctgagaaaaatga

SEQ ID NO: 615 - DNA, 171 bp, Artificial Sequence
  Description of Artificial Sequence: Synthetic polynucleotide
ccagaggctgagaaaaatgagcagtattgttcaagttctgtcaccttcctgcctgagagaggagcaagacctgaaagaaagtctttgctttgtagatgctatctgtgagcagcagttgataatgtgcataaaatctgggaacaggccagatgtggatgacatcactgagta

SEQ ID NO: 616 - DNA, 80 bp, Artificial Sequence
  Description of Artificial Sequence: Synthetic oligonucleotide
  Description of Combined DNA/RNA Molecule: Synthetic oligonucleotide
gtggatgacaucactgagtaacgauaacggtacaaggctaaagcuutgctaacggucgagccagaggcugagaaaaatga

SEQ ID NO: 617 - DNA, 20 bp, Artificial Sequence
  Description of Artificial Sequence: Synthetic primer
tttttttctttctctctttc

SEQ ID NO: 618 - DNA, 20 bp, Artificial Sequence
  Description of Artificial Sequence: Synthetic primer
catgagcggtgtgatcgacc

SEQ ID NO: 619 - DNA, 172 bp, Artificial Sequence
  Description of Artificial Sequence: Synthetic polynucleotide
gaaagagagaaagaaaaaaaaaaaaacagaaatgtgctttgggtgaaaatgtcaaggtctaaggcagagaagatgggaatggagatttttattcctctcagggcttctcagtctgagtggttactccagtgactcctattgtcccttcagctggtcgatcacaccgctcatg

SEQ ID NO: 620 - DNA, 80 bp, Artificial Sequence
  Description of Artificial Sequence: Synthetic oligonucleotide
  Description of Combined DNA/RNA Molecule: Synthetic oligonucleotide
tttttttctutctctctttcacgauaacggtacaaggctaaagcuutgctaacggucgagcatgagcggugtgatcgacc

SEQ ID NO: 621 - DNA, 20 bp, Artificial Sequence
  Description of Artificial Sequence: Synthetic primer
tttatttacaggcctgtcag

SEQ ID NO: 622 - DNA, 20 bp, Artificial Sequence
  Description of Artificial Sequence: Synthetic primer
caacatcaagcagatctgta

SEQ ID NO: 623 - DNA, 172 bp, Artificial Sequence
  Description of Artificial Sequence: Synthetic polynucleotide
ctgacaggcctgtaaataaaatctagtatttttgaggcctcaggtaaaatagaattttcatattgattaggctgttccaatgaatattttttaattaaaaattaaattggtagagtgattaaaaacatgttattttccttcttcaactagattacagatctgcttgatgttg

SEQ ID NO: 624 - DNA, 80 bp, Artificial Sequence
  Description of Artificial Sequence: Synthetic oligonucleotide
  Description of Combined DNA/RNA Molecule: Synthetic oligonucleotide
tttattuacaggcctgtcagacgauaacggtacaaggctaaagcuutgctaacggucgagcaacaucaagcagatctgta

SEQ ID NO: 625 - DNA, 20 bp, Artificial Sequence
  Description of Artificial Sequence: Synthetic primer
ctgggcaaagagaggcggtg

SEQ ID NO: 626 - DNA, 20 bp, Artificial Sequence
  Description of Artificial Sequence: Synthetic primer
ccaaccgggactggtatgag

SEQ ID NO: 627 - DNA, 172 bp, Artificial Sequence
  Description of Artificial Sequence: Synthetic polynucleotide
ccaaccgggactggtatgagcaggtatggaccagcggaggggggagcggtggggcaacccaggagggctggagagtgggggcctagaggcctgggatgcagtaggggtcgctggggctccaagcctgtggaccccgagccctagcattgcagctgggcaaagagaggcggtg

SEQ ID NO: 628 - DNA, 80 bp, Artificial Sequence
  Description of Artificial Sequence: Synthetic oligonucleotide
  Description of Combined DNA/RNA Molecule: Synthetic oligonucleotide
ctgggcaaagagaggcggugacgauaacggtacaaggctaaagcuutgctaacggucgagccaaccgggacuggtatgag

SEQ ID NO: 629 - DNA, 20 bp, Artificial Sequence
  Description of Artificial Sequence: Synthetic primer
ccatgtgtgggtgttctgtt

SEQ ID NO: 630 - DNA, 20 bp, Artificial Sequence
  Description of Artificial Sequence: Synthetic primer
ccatttcctccaacaagcaa

SEQ ID NO: 631 - DNA, 172 bp, Artificial Sequence
  Description of Artificial Sequence: Synthetic polynucleotide
aacagaacacccacacatggtaagttcaccaaggactatacgccagcatgttacctgtccgttgttaaaagataatcagtatctcaaagagtaagcttaacttttgaatcaggaatggatttggggttaacaaaaagctcactagctcaccattgcttgttggaggaaatgg

SEQ ID NO: 632 - DNA, 80 bp, Artificial Sequence
  Description of Artificial Sequence: Synthetic oligonucleotide
  Description of Combined DNA/RNA Molecule: Synthetic oligonucleotide
ccatgtgugggtgttctgttacgauaacggtacaaggctaaagcuutgctaacggucgagccatttccuccaacaagcaa

SEQ ID NO: 633 - DNA, 20 bp, Artificial Sequence
  Description of Artificial Sequence: Synthetic primer
tcagttgtcacagaatttga

SEQ ID NO: 634 - DNA, 20 bp, Artificial Sequence
  Description of Artificial Sequence: Synthetic primer
cttggatagacttatacctc

SEQ ID NO: 635 - DNA, 172 bp, Artificial Sequence
  Description of Artificial Sequence: Synthetic polynucleotide
tcaaattctgtgacaactgataatccataattatagtaatcaaaatagttaataggctagaactctcttttactaagcaaaagaagtgacagcattaaaaataaatgatacagtaaaaataatgtcccgccttctacggtgtcagctcacctgaggtataagtctatccaag

SEQ ID NO: 636 - DNA, 80 bp, Artificial Sequence
  Description of Artificial Sequence: Synthetic oligonucleotide
  Description of Combined DNA/RNA Molecule: Synthetic oligonucleotide
tcagttgucacagaatttgaacgauaacggtacaaggctaaagcuutgctaacggucgagcttggatagacutatacctc

SEQ ID NO: 637 - DNA, 20 bp, Artificial Sequence
  Description of Artificial Sequence: Synthetic primer
gtatgacaccaacgcaaagt

SEQ ID NO: 638 - DNA, 20 bp, Artificial Sequence
  Description of Artificial Sequence: Synthetic primer
cattatgtttgagctgtagt

SEQ ID NO: 639 - DNA, 172 bp, Artificial Sequence
  Description of Artificial Sequence: Synthetic polynucleotide
actttgcgttggtgtcatacatgggattttcaaaagctgcttggccattgttattttcatgaactgaacatcctgtatactgtgttttaggtgcagtcctgttgatgagaacattgattagctatgtgttaactttcttccagaaacagcagactacagctcaaacataatg

SEQ ID NO: 640 - DNA, 80 bp, Artificial Sequence
  Description of Artificial Sequence: Synthetic oligonucleotide
  Description of Combined DNA/RNA Molecule: Synthetic oligonucleotide
gtaugacaccaacgcaaagtacgauaacggtacaaggctaaagcuutgctaacggucgagcattatgttugagctgtagt

SEQ ID NO: 641 - DNA, 20 bp, Artificial Sequence
  Description of Artificial Sequence: Synthetic primer
catgaaatattaccaaaaag

SEQ ID NO: 642 - DNA, 20 bp, Artificial Sequence
  Description of Artificial Sequence: Synthetic primer
cttgttcacagcttcatttt

SEQ ID NO: 643 - DNA, 173 bp, Artificial Sequence
  Description of Artificial Sequence: Synthetic polynucleotide
cttgttcacagcttcattttagtggtaagttctaggaaaggaatttgtgtttaccagttcctttctccattttacttcacctgatcaatatagattatcttatttatgtttgtgctctaacaccaagttgctaatttaagcctccagtaatgacatgaaatattaccaaaaag

SEQ ID NO: 644 - DNA, 80 bp, Artificial Sequence
  Description of Artificial Sequence: Synthetic oligonucleotide
  Description of Combined DNA/RNA Molecule: Synthetic oligonucleotide
catgaaatautaccaaaaagacgauaacggtacaaggctaaagcuutgctaacggucgagcttgttcacagcutcatttt

SEQ ID NO: 645 - DNA, 20 bp, Artificial Sequence
  Description of Artificial Sequence: Synthetic primer
cagcctggccaacatggtga

SEQ ID NO: 646 - DNA, 20 bp, Artificial Sequence
  Description of Artificial Sequence: Synthetic primer
ctgtaatggcaagggaccca

SEQ ID NO: 647 - DNA, 173 bp, Artificial Sequence
  Description of Artificial Sequence: Synthetic polynucleotide
tcaccatgttggccaggctggtctcgaactcctgacctcgtgatccacccgcctcggcctcccaaagtgctgggattacaggcgtgagccaccgagcccggctgttttcatttttaaaaggcacacttacctaatggggctggaaatagaatctgggtcccttgccattacag

SEQ ID NO: 648 - DNA, 80 bp, Artificial Sequence
  Description of Artificial Sequence: Synthetic oligonucleotide
  Description of Combined DNA/RNA Molecule: Synthetic oligonucleotide
cagccuggccaacatggtgaacgauaacggtacaaggctaaagcuutgctaacggucgagctgtaauggcaagggaccca

SEQ ID NO: 649 - DNA, 20 bp, Artificial Sequence
  Description of Artificial Sequence: Synthetic primer
attaagactccttggcacct

SEQ ID NO: 650 - DNA, 20 bp, Artificial Sequence
  Description of Artificial Sequence: Synthetic primer
caagctgaccttgccgaagt

SEQ ID NO: 651 - DNA, 173 bp, Artificial Sequence
  Description of Artificial Sequence: Synthetic polynucleotide
caagctgaccttgccgaagtgaccctggtcgggagcgcacgagggtcagctccacctccccaatccctgcaccactccccaacccccgatttcccgggccactcctccaggcagatcctttcggaataccccaggccccgcctactccgctctattaagactccttggcacct

SEQ ID NO: 652 - DNA, 80 bp, Artificial Sequence
  Description of Artificial Sequence: Synthetic oligonucleotide
  Description of Combined DNA/RNA Molecule: Synthetic oligonucleotide
attaagacuccttggcacctacgauaacggtacaaggctaaagcuutgctaacggucgagcaagctgaccutgccgaagt

SEQ ID NO: 653 - DNA, 20 bp, Artificial Sequence
  Description of Artificial Sequence: Synthetic primer
agccctcctcactagctgta

SEQ ID NO: 654 - DNA, 20 bp, Artificial Sequence
  Description of Artificial Sequence: Synthetic primer
cggacacggagagtgcaagt

SEQ ID NO: 655 - DNA, 173 bp, Artificial Sequence
  Description of Artificial Sequence: Synthetic polynucleotide
cggacacggagagtgcaagtggccaggctgtgagaccctgtgtgaagacctgggccagtttatcaagtaggtgtcacccccagcccctcccccagcagcctttccccacagggcctctcccccaaccctgcccactagcttgccccttctgggagccctcctcactagctgta

SEQ ID NO: 656 - DNA, 80 bp, Artificial Sequence
  Description of Artificial Sequence: Synthetic oligonucleotide
  Description of Combined DNA/RNA Molecule: Synthetic oligonucleotide
agccctccucactagctgtaacgauaacggtacaaggctaaagcuutgctaacggucgagcggacacggagagugcaagt

SEQ ID NO: 657 - DNA, 20 bp, Artificial Sequence
  Description of Artificial Sequence: Synthetic primer
aaggcaaaggaattagagag

SEQ ID NO: 658 - DNA, 20 bp, Artificial Sequence
  Description of Artificial Sequence: Synthetic primer
catgatcctcaacgagccct

SEQ ID NO: 659 - DNA, 173 bp, Artificial Sequence
  Description of Artificial Sequence: Synthetic polynucleotide
ctctctaattcctttgcctttgcgagggtcctcctgacaccgtccctccctgccccgtgcagccctggcccttcagaagacagaccttaaacctgcgggccaggaacttgttcttcatctccaggtagttgcccttgtggacctcagacttgaagggctcgttgaggatcatg

SEQ ID NO: 660 - DNA, 80 bp, Artificial Sequence
  Description of Artificial Sequence: Synthetic oligonucleotide
  Description of Combined DNA/RNA Molecule: Synthetic oligonucleotide
aaggcaaaggaautagagagacgauaacggtacaaggctaaagcuutgctaacggucgagcatgatccucaacgagccct

SEQ ID NO: 661 - DNA, 20 bp, Artificial Sequence
  Description of Artificial Sequence: Synthetic primer
ccaatttgttcatatttgta

SEQ ID NO: 662 - DNA, 20 bp, Artificial Sequence
  Description of Artificial Sequence: Synthetic primer
ctaagccaggtccacctgtc

SEQ ID NO: 663 - DNA, 173 bp, Artificial Sequence
  Description of Artificial Sequence: Synthetic polynucleotide
ctaagccaggtccacctgtcagaggacgaggaggacagtgaggatttccactccattgctggggacagtgacttggactctgatgaatgaggcttcctttgggcctccttggtcagccttccctgttctccagcctaggtggttcacctttccccaatttgttcatatttgta

SEQ ID NO: 664 - DNA, 80 bp, Artificial Sequence
  Description of Artificial Sequence: Synthetic oligonucleotide
  Description of Combined DNA/RNA Molecule: Synthetic oligonucleotide
ccaatttgtucatatttgtaacgauaacggtacaaggctaaagcuutgctaacggucgagctaagccagguccacctgtc

SEQ ID NO: 665 - DNA, 20 bp, Artificial Sequence
  Description of Artificial Sequence: Synthetic primer
cgcggttggtcaggcggctc

SEQ ID NO: 666 - DNA, 20 bp, Artificial Sequence
  Description of Artificial Sequence: Synthetic primer
catctgggaggagccgaaag

SEQ ID NO: 667 - DNA, 173 bp, Artificial Sequence
  Description of Artificial Sequence: Synthetic polynucleotide
catctgggaggagccgaaagcgccctggaggcaaggactcagcttcacaggtggtctcaggccccccacccagcctccacccaggggcacgccagggggctcgggccggggcacacaggccgagcctgacctgctggatggtggggtccccggcgcggttggtcaggcggctc

SEQ ID NO: 668 - DNA, 80 bp, Artificial Sequence
  Description of Artificial Sequence: Synthetic oligonucleotide
  Description of Combined DNA/RNA Molecule: Synthetic oligonucleotide
cgcggttggucaggcggctcacgauaacggtacaaggctaaagcuutgctaacggucgagcatcugggaggagccgaaag

SEQ ID NO: 669 - DNA, 20 bp, Artificial Sequence
  Description of Artificial Sequence: Synthetic primer
tcccgttggcaggaggcgta

SEQ ID NO: 670 - DNA, 20 bp, Artificial Sequence
  Description of Artificial Sequence: Synthetic primer
catttgtgtgttcattctgt

SEQ ID NO: 671 - DNA, 173 bp, Artificial Sequence
  Description of Artificial Sequence: Synthetic polynucleotide
catttgtgtgttcattctgtcatgtgactaatatttagtgcctaattgctattcagttatgaaagggaaaaagaggtccttgatgattaaactctgacaccaattgttggtatcagaattggcatttctgtgactcacccattatactgtctgtcccgttggcaggaggcgta

SEQ ID NO: 672 - DNA, 80 bp, Artificial Sequence
  Description of Artificial Sequence: Synthetic oligonucleotide
  Description of Combined DNA/RNA Molecule: Synthetic oligonucleotide
tcccgtuggcaggaggcgtaacgauaacggtacaaggctaaagcuutgctaacggucgagcatttgtgugttcattctgt

SEQ ID NO: 673 - DNA, 20 bp, Artificial Sequence
  Description of Artificial Sequence: Synthetic primer
aacagcgtgcggggcaggga

SEQ ID NO: 674 - DNA, 20 bp, Artificial Sequence
  Description of Artificial Sequence: Synthetic primer
ccatgggctgcttggatgaa

SEQ ID NO: 675 - DNA, 173 bp, Artificial Sequence
  Description of Artificial Sequence: Synthetic polynucleotide
tccctgccccgcacgctgttgaggctgatttcgtattcggtagctgggttcagtctggtgatggtgaattctgtcacagtgttgggcaccactgagctgtctagtcgtcccactggagaagagaagaatctacagttaaaattcagcagccctttcatccaagcagcccatgg

SEQ ID NO: 676 - DNA, 80 bp, Artificial Sequence
  Description of Artificial Sequence: Synthetic oligonucleotide
  Description of Combined DNA/RNA Molecule: Synthetic oligonucleotide
aacagcgugcggggcagggaacgauaacggtacaaggctaaagcuutgctaacggucgagccatgggcugcttggatgaa

SEQ ID NO: 677 - DNA, 20 bp, Artificial Sequence
  Description of Artificial Sequence: Synthetic primer
acagattctctttgaaaatt

SEQ ID NO: 678 - DNA, 20 bp, Artificial Sequence
  Description of Artificial Sequence: Synthetic primer
ctttgattctagtcttttca

SEQ ID NO: 679 - DNA, 174 bp, Artificial Sequence
  Description of Artificial Sequence: Synthetic polynucleotide
aattttcaaagagaatctgtatccataatgttaacttaaaaatcttttgttttttaaacaaatgtaaacctttgcaattaccgtttcatacaaaggagcagaatatagtaaaatattttttctactgcagagggggagagacttgatgccaaaatgaaaagactagaatcaaag

SEQ ID NO: 680 - DNA, 80 bp, Artificial Sequence
  Description of Artificial Sequence: Synthetic oligonucleotide
  Description of Combined DNA/RNA Molecule: Synthetic oligonucleotide
acagattcuctttgaaaattacgauaacggtacaaggctaaagcuutgctaacggucgagctttgattcuagtcttttca

SEQ ID NO: 681 - DNA, 20 bp, Artificial Sequence
  Description of Artificial Sequence: Synthetic primer
aggtgcggccgggcgcagtg

SEQ ID NO: 682 - DNA, 20 bp, Artificial Sequence
  Description of Artificial Sequence: Synthetic primer
ccagggccagcagctgagga

SEQ ID NO: 683 - DNA, 174 bp, Artificial Sequence
  Description of Artificial Sequence: Synthetic polynucleotide
cactgcgcccggccgcacctggcctacgttcttaaccctgatctctgtctgccgggacagtcccctcacaggtcaccaatgcctcttccccagggagactggggtggggcgtgagccggggctccctgaagcacccctttgtccacacaggcactcctcagctgctggccctgg

SEQ ID NO: 684 - DNA, 80 bp, Artificial Sequence
  Description of Artificial Sequence: Synthetic oligonucleotide
  Description of Combined DNA/RNA Molecule: Synthetic oligonucleotide
aggugcggccgggcgcagtgacgauaacggtacaaggctaaagcuutgctaacggucgagccagggccagcagcugagga

SEQ ID NO: 685 - DNA, 20 bp, Artificial Sequence
  Description of Artificial Sequence: Synthetic primer
cccggctcccaccccctgta

SEQ ID NO: 686 - DNA, 20 bp, Artificial Sequence
  Description of Artificial Sequence: Synthetic primer
cagatggtgcttggccgctg

SEQ ID NO: 687 - DNA, 174 bp, Artificial Sequence
  Description of Artificial Sequence: Synthetic polynucleotide
cagatggtgcttggccgctgggaaacctgtattggggcagaaatgtcaccagcaggggagctggtgctcagctgactacagggccgctggggtcttcagggtccctgatcggccacctccctgctgtcctcccagctcttcccacgaggagacccccggctcccaccccctgta

SEQ ID NO: 688 - DNA, 80 bp, Artificial Sequence
  Description of Artificial Sequence: Synthetic oligonucleotide
  Description of Combined DNA/RNA Molecule: Synthetic oligonucleotide
cccggcucccaccccctgtaacgauaacggtacaaggctaaagcuutgctaacggucgagcagatggtgcutggccgctg

SEQ ID NO: 689 - DNA, 20 bp, Artificial Sequence
  Description of Artificial Sequence: Synthetic primer
aggaaggaaagagaggtctt

SEQ ID NO: 690 - DNA, 20 bp, Artificial Sequence
  Description of Artificial Sequence: Synthetic primer
cggtgtgaactactttgcaa

SEQ ID NO: 691 - DNA, 174 bp, Artificial Sequence
  Description of Artificial Sequence: Synthetic polynucleotide
cggtgtgaactactttgcaatccgggtgtgttgaaacctctctgagctccttgtgtagtagacagagactgagtgagggccagactgctaaaatggttacttcttcattccaaggcgatagactcttttatggttctgtggtaaagaaggaaagaggaaggaaagagaggtctt

SEQ ID NO: 692 - DNA, 80 bp, Artificial Sequence
  Description of Artificial Sequence: Synthetic oligonucleotide
  Description of Combined DNA/RNA Molecule: Synthetic oligonucleotide
aggaaggaaagagaggucttacgauaacggtacaaggctaaagcuutgctaacggucgagcggtgtgaacuactttgcaa

SEQ ID NO: 693 - DNA, 20 bp, Artificial Sequence
  Description of Artificial Sequence: Synthetic primer
aaataatctggggtttggta

SEQ ID NO: 694 - DNA, 20 bp, Artificial Sequence
  Description of Artificial Sequence: Synthetic primer
cccacttgaaatccgaatgt

SEQ ID NO: 695 - DNA, 174 bp, Artificial Sequence
  Description of Artificial Sequence: Synthetic polynucleotide
cccacttgaaatccgaatgtattgttctgagatccatgccgaggcacacctgggttttcacaagaggtttgggtaggctctaaaatgaagattaaaaagatattagtcctttaaaatttacaatagatatagttctctcacagaaaacaattttaaataatctggggtttggta

SEQ ID NO: 696 - DNA, 80 bp, Artificial Sequence
  Description of Artificial Sequence: Synthetic oligonucleotide
  Description of Combined DNA/RNA Molecule: Synthetic oligonucleotide
aaataatcuggggtttggtaacgauaacggtacaaggctaaagcuutgctaacggucgagcccacttgaaauccgaatgt

SEQ ID NO: 697 - DNA, 20 bp, Artificial Sequence
  Description of Artificial Sequence: Synthetic primer
cctccagccgcagccccgcc

SEQ ID NO: 698 - DNA, 20 bp, Artificial Sequence
  Description of Artificial Sequence: Synthetic primer
cgtggtgcgcgaggaggacg

SEQ ID NO: 699 - DNA, 175 bp, Artificial Sequence
  Description of Artificial Sequence: Synthetic polynucleotide
ggcggggctgcggctggagggcggggtcacagcttggagggctggctgcggcgggagggcggggtcacagtggaaggcgtggacacagtggggggcggggctgcggatggagggcggggctgcggatggagggcgggccggggaccttaccacgccgtcctcctcgcgcaccacg

SEQ ID NO: 700 - DNA, 80 bp, Artificial Sequence
  Description of Artificial Sequence: Synthetic oligonucleotide
  Description of Combined DNA/RNA Molecule: Synthetic oligonucleotide
ccuccagccgcagccccgccacgauaacggtacaaggctaaagcuutgctaacggucgagcgtggugcgcgaggaggacg

SEQ ID NO: 701 - DNA, 20 bp, Artificial Sequence
  Description of Artificial Sequence: Synthetic primer
gattaaaaaaaattggatat

SEQ ID NO: 702 - DNA, 20 bp, Artificial Sequence
  Description of Artificial Sequence: Synthetic primer
cagcttgaccgacagacagc

SEQ ID NO: 703 - DNA, 175 bp, Artificial Sequence
  Description of Artificial Sequence: Synthetic polynucleotide
atatccaattttttttaatcctcatcaaaagaaagtttaccactctctctttccagacctggccaggcaggaggcgccatcatgggagttgacacccgccacaaggaccgaaaggttcggcgcaaggagcctaagagccaggatatctacctgaggctgtctgtcggtcaagctg

SEQ ID NO: 704 - DNA, 80 bp, Artificial Sequence
  Description of Artificial Sequence: Synthetic oligonucleotide
  Description of Combined DNA/RNA Molecule: Synthetic oligonucleotide
gattaaaaaaaautggatatacgauaacggtacaaggctaaagcuutgctaacggucgagcagctugaccgacagacagc

SEQ ID NO: 705 - DNA, 20 bp, Artificial Sequence
  Description of Artificial Sequence: Synthetic primer
gtcaaataggaaatactgtt

SEQ ID NO: 706 - DNA, 20 bp, Artificial Sequence
  Description of Artificial Sequence: Synthetic primer
ccagatcccacagactgata

SEQ ID NO: 707 - DNA, 175 bp, Artificial Sequence
  Description of Artificial Sequence: Synthetic polynucleotide
ccagatcccacagactgatatggctggtaaggatacgattgattttttttttttttttgtcttttaaatgcctacttgtgacataaaaacctatcatcgttttccaagttatttttgttataaaggtgcttttacatcttctattgtcaactggtgtcaaataggaaatactgtt

SEQ ID NO: 708 - DNA, 80 bp, Artificial Sequence
  Description of Artificial Sequence: Synthetic oligonucleotide
  Description of Combined DNA/RNA Molecule: Synthetic oligonucleotide
gtcaaauaggaaatactgttacgauaacggtacaaggctaaagcuutgctaacggucgagccagaucccacagactgata

SEQ ID NO: 709 - DNA, 20 bp, Artificial Sequence
  Description of Artificial Sequence: Synthetic primer
atcacattaacaaactaaaa

SEQ ID NO: 710 - DNA, 20 bp, Artificial Sequence
  Description of Artificial Sequence: Synthetic primer
cgttccccatgtcgctgttg

SEQ ID NO: 711 - DNA, 175 bp, Artificial Sequence
  Description of Artificial Sequence: Synthetic polynucleotide
ttttagtttgttaatgtgatggaatagttttcaaattatcctttttttttttttttaggctacagattgcaacccaattaatatcaaagtatcctgcaagtttacctaactgtgagctgtctccattactgatgatactatctcagcttctaccccaacagcgacatggggaacg

SEQ ID NO: 712 - DNA, 80 bp, Artificial Sequence
  Description of Artificial Sequence: Synthetic oligonucleotide
  Description of Combined DNA/RNA Molecule: Synthetic oligonucleotide
atcacatuaacaaactaaaaacgauaacggtacaaggctaaagcuutgctaacggucgagcgttccccaugtcgctgttg

SEQ ID NO: 713 - DNA, 20 bp, Artificial Sequence
  Description of Artificial Sequence: Synthetic primer
gggctgggctgccagaagta

SEQ ID NO: 714 - DNA, 20 bp, Artificial Sequence
  Description of Artificial Sequence: Synthetic primer
cattctgcggaggttaataa

SEQ ID NO: 715 - DNA, 175 bp, Artificial Sequence
  Description of Artificial Sequence: Synthetic polynucleotide
cattctgcggaggttaataatcctctgaaatcttagactctcatatagaatctagtctagaatatggttcttaagaacaataccagtttttaaccattgttttatgtttatataaaattttaattgttctttaattcatacctatacagactggtgggctgggctgccagaagta

SEQ ID NO: 716 - DNA, 80 bp, Artificial Sequence
  Description of Artificial Sequence: Synthetic oligonucleotide
  Description of Combined DNA/RNA Molecule: Synthetic oligonucleotide
gggctgggcugccagaagtaacgauaacggtacaaggctaaagcuutgctaacggucgagcattcugcggaggttaataa

SEQ ID NO: 717 - DNA, 20 bp, Artificial Sequence
  Description of Artificial Sequence: Synthetic primer
tgtttatagaggcaataaat

SEQ ID NO: 718 - DNA, 20 bp, Artificial Sequence
  Description of Artificial Sequence: Synthetic primer
ctggatccctatctcttgcc

SEQ ID NO: 719 - DNA, 176 bp, Artificial Sequence
  Description of Artificial Sequence: Synthetic polynucleotide
atttattgcctctataaacaataaagttaaacatgggcaacttggaggaaaactatagggtgcattaatttttttcaccacatagaagagaaagaaaccaacttggaaatacttcttaatgcattaggggttcaagattaggttacttactcctctggcaagagatagggatccag

SEQ ID NO: 720 - DNA, 80 bp, Artificial Sequence
  Description of Artificial Sequence: Synthetic oligonucleotide
  Description of Combined DNA/RNA Molecule: Synthetic oligonucleotide
tgtttauagaggcaataaatacgauaacggtacaaggctaaagcuutgctaacggucgagctggatcccuatctcttgcc

SEQ ID NO: 721 - DNA, 20 bp, Artificial Sequence
  Description of Artificial Sequence: Synthetic primer
aaggacactcgggcagaatt

SEQ ID NO: 722 - DNA, 20 bp, Artificial Sequence
  Description of Artificial Sequence: Synthetic primer
cagcagacccacgacggtgc

SEQ ID NO: 723 - DNA, 176 bp, Artificial Sequence
  Description of Artificial Sequence: Synthetic polynucleotide
aattctgcccgagtgtccttcacttccttctccccagagggttcttaggagtgaggggcagcaccatgcatggcggggcgtggggctttgtgtttttcctgcctgtggcctggagcgctgacagcgcctgcccctctgctctctctgcagcctggagcaccgtcgtgggtctgctg

SEQ ID NO: 724 - DNA, 80 bp, Artificial Sequence
  Description of Artificial Sequence: Synthetic oligonucleotide
  Description of Combined DNA/RNA Molecule: Synthetic oligonucleotide
aaggacacucgggcagaattacgauaacggtacaaggctaaagcuutgctaacggucgagcagcagacccacgacggugc

SEQ ID NO: 725 - DNA, 20 bp, Artificial Sequence
  Description of Artificial Sequence: Synthetic primer
tttctaacttatcttttaac

SEQ ID NO: 726 - DNA, 20 bp, Artificial Sequence
  Description of Artificial Sequence: Synthetic primer
cctactgcctcctccatctc

SEQ ID NO: 727 - DNA, 176 bp, Artificial Sequence
  Description of Artificial Sequence: Synthetic polynucleotide
cctactgcctcctccatctcgttatgcctgccaaggtgagcgagaaacagttttaaaagctcgtaacttcactgatattcgtatctatggcgtgggtatcagcttgcatcttctgaactgagaagctcatgaaaacctaccgttctcgctttgacttttctaacttatcttttaac

SEQ ID NO: 728 - DNA, 80 bp, Artificial Sequence
  Description of Artificial Sequence: Synthetic oligonucleotide
  Description of Combined DNA/RNA Molecule: Synthetic oligonucleotide
tttctaactuatcttttaacacgauaacggtacaaggctaaagcuutgctaacggucgagcctactgccucctccatctc

SEQ ID NO: 729 - DNA, 20 bp, Artificial Sequence
  Description of Artificial Sequence: Synthetic primer
tgttaaccatgtatcctgaa

SEQ ID NO: 730 - DNA, 20 bp, Artificial Sequence
  Description of Artificial Sequence: Synthetic primer
ctccattgtttcaggaaatg

SEQ ID NO: 731 - DNA, 176 bp, Artificial Sequence
  Description of Artificial Sequence: Synthetic polynucleotide
ttcaggatacatggttaacaattacatttaagatgggcacaattttattagaaaacaatagaatagataataatttcaattcaatctgaaattaggccaaatctaagtttactggttgatggtgagaacacaaactaaaagtctactcaccttcttcatttcctgaaacaatggag

SEQ ID NO: 732 - DNA, 80 bp, Artificial Sequence
  Description of Artificial Sequence: Synthetic oligonucleotide
  Description of Combined DNA/RNA Molecule: Synthetic oligonucleotide
tgttaaccaugtatcctgaaacgauaacggtacaaggctaaagcuutgctaacggucgagctccattgtutcaggaaatg

SEQ ID NO: 733 - DNA, 20 bp, Artificial Sequence
  Description of Artificial Sequence: Synthetic primer
cctccacataaggataaaca

SEQ ID NO: 734 - DNA, 20 bp, Artificial Sequence
  Description of Artificial Sequence: Synthetic primer
ccactttctatactgacagc

SEQ ID NO: 735 - DNA, 176 bp, Artificial Sequence
  Description of Artificial Sequence: Synthetic polynucleotide
tgtttatccttatgtggaggcaagaatacatttttttcttcttgtagaaattatttctcttaggtcagtcagcatcttcccagtagagttatttactgctaaaaacagtattgctgtttcatgtaatttttcctcatttactgcttacaggatgacgctgtcagtatagaaagtgg

SEQ ID NO: 736 - DNA, 80 bp, Artificial Sequence
  Description of Artificial Sequence: Synthetic oligonucleotide
  Description of Combined DNA/RNA Molecule: Synthetic oligonucleotide
cctccacauaaggataaacaacgauaacggtacaaggctaaagcuutgctaacggucgagccactttcuatactgacagc

SEQ ID NO: 737 - DNA, 20 bp, Artificial Sequence
  Description of Artificial Sequence: Synthetic primer
tgactttcaatggcagaaac

SEQ ID NO: 738 - DNA, 20 bp, Artificial Sequence
  Description of Artificial Sequence: Synthetic primer
ctgctgcttggcctcaaaat

SEQ ID NO: 739 - DNA, 177 bp, Artificial Sequence
  Description of Artificial Sequence: Synthetic polynucleotide
gtttctgccattgaaagtcatggcagaaaccacagttacttttgcaccaacctaatatattaccaaaagcaacagttaaggatttaattttatttttactaacacaaaatgtttcgttttgtttttaacttcattgtttctgctctctagggcttggattttgaggccaagcagcag

SEQ ID NO: 740 - DNA, 80 bp, Artificial Sequence
  Description of Artificial Sequence: Synthetic oligonucleotide
  Description of Combined DNA/RNA Molecule: Synthetic oligonucleotide
tgactttcaauggcagaaacacgauaacggtacaaggctaaagcuutgctaacggucgagctgctgctuggcctcaaaat

SEQ ID NO: 741 - DNA, 20 bp, Artificial Sequence
  Description of Artificial Sequence: Synthetic primer
agttaagtttgttataaaaa

SEQ ID NO: 742 - DNA, 20 bp, Artificial Sequence
  Description of Artificial Sequence: Synthetic primer
cgtggtctttgagaggagtg

SEQ ID NO: 743 - DNA, 177 bp, Artificial Sequence
  Description of Artificial Sequence: Synthetic polynucleotide
cgtggtctttgagaggagtgccaagcaggtcagtgcacacctggtgcccagcctccccctaaactcccgtgctcacacctgtctccacagagaggctgagcttgacatttccgccatcttgaaaaccactttctaatgacaaacagtatagccttctagttaagtttgttataaaaa

SEQ ID NO: 744 - DNA, 80 bp, Artificial Sequence
  Description of Artificial Sequence: Synthetic oligonucleotide
  Description of Combined DNA/RNA Molecule: Synthetic oligonucleotide
agttaagttugttataaaaaacgauaacggtacaaggctaaagcuutgctaacggucgagcgtggtcttugagaggagtg

SEQ ID NO: 745 - DNA, 20 bp, Artificial Sequence
  Description of Artificial Sequence: Synthetic primer
ataaataatcccatgttcat

SEQ ID NO: 746 - DNA, 20 bp, Artificial Sequence
  Description of Artificial Sequence: Synthetic primer
caaatgttttttcagtttct

SEQ ID NO: 747 - DNA, 177 bp, Artificial Sequence
  Description of Artificial Sequence: Synthetic polynucleotide
caaatgttttttcagtttcttttcttatctgcaaagaatgatttaagaaaaaactttatttcctgatgcccaatgaaataatatggtgtttattaaatataacaacataggaatttgaagatgtaaaatcccttttctgcagatgtcactaaataaaataaataatcccatgttcat

SEQ ID NO: 748 - DNA, 80 bp, Artificial Sequence
  Description of Artificial Sequence: Synthetic oligonucleotide
  Description of Combined DNA/RNA Molecule: Synthetic oligonucleotide
ataaataaucccatgttcatacgauaacggtacaaggctaaagcuutgctaacggucgagcaaatgtttuttcagtttct

SEQ ID NO: 749 - DNA, 20 bp, Artificial Sequence
  Description of Artificial Sequence: Synthetic primer
aaggtcattttaagggtata

SEQ ID NO: 750 - DNA, 20 bp, Artificial Sequence
  Description of Artificial Sequence: Synthetic primer
ccgcaacctttgaggctcac

SEQ ID NO: 751 - DNA, 177 bp, Artificial Sequence
  Description of Artificial Sequence: Synthetic polynucleotide
tatacccttaaaatgacctttccatagtgttggactaattttccgaagtgaaagcagggcttaaacttggcgtcaagtcctgcagcaacgttaacttactggagaggaggcaaaggaaaaaaaaacaaaagtgtgaatgtgtgagcttaccactaatgtgagcctcaaaggttgcgg

SEQ ID NO: 752 - DNA, 80 bp, Artificial Sequence
  Description of Artificial Sequence: Synthetic oligonucleotide
  Description of Combined DNA/RNA Molecule: Synthetic oligonucleotide
aaggtcattutaagggtataacgauaacggtacaaggctaaagcuutgctaacggucgagccgcaacctutgaggctcac

SEQ ID NO: 753 - DNA, 20 bp, Artificial Sequence
  Description of Artificial Sequence: Synthetic primer
gggcatccccgaagcctgag

SEQ ID NO: 754 - DNA, 20 bp, Artificial Sequence
  Description of Artificial Sequence: Synthetic primer
catgtttgccacgctcaact

SEQ ID NO: 755 - DNA, 177 bp, Artificial Sequence
  Description of Artificial Sequence: Synthetic polynucleotide
catgtttgccacgctcaactccctgcaggtgagagccgcggggactggcggggaggcagggccgccagccatcaggagcaggcttgcagggagctagggctgcaggggcaggagggaggcctgccctcccggccacaccttaggagcctgtaatgcggggcatccccgaagcctgag

SEQ ID NO: 756 - DNA, 80 bp, Artificial Sequence
  Description of Artificial Sequence: Synthetic oligonucleotide
  Description of Combined DNA/RNA Molecule: Synthetic oligonucleotide
gggcauccccgaagcctgagacgauaacggtacaaggctaaagcuutgctaacggucgagcatgttugccacgctcaact

SEQ ID NO: 757 - DNA, 20 bp, Artificial Sequence
  Description of Artificial Sequence: Synthetic primer
tatcatttgagttactttga

SEQ ID NO: 758 - DNA, 20 bp, Artificial Sequence
  Description of Artificial Sequence: Synthetic primer
caactgttttcctagtttcc

SEQ ID NO: 759 - DNA, 177 bp, Artificial Sequence
  Description of Artificial Sequence: Synthetic polynucleotide
caactgttttcctagtttccttcattatctgatcatacaaaagaaagtaagaaaatagtcattaaattccataaatctttaataaaagaaacgtaagtcaaaaagaaaggaggcaaaatttcttcctattcaaggaaattttaattgcactaaaatatatcatttgagttactttga

SEQ ID NO: 760 - DNA, 80 bp, Artificial Sequence
  Description of Artificial Sequence: Synthetic oligonucleotide
  Description of Combined DNA/RNA Molecule: Synthetic oligonucleotide
tatcattugagttactttgaacgauaacggtacaaggctaaagcuutgctaacggucgagcaactgtttucctagtttcc

SEQ ID NO: 761 - DNA, 20 bp, Artificial Sequence
  Description of Artificial Sequence: Synthetic primer
tgcccaaatgggggaccctg

SEQ ID NO: 762 - DNA, 20 bp, Artificial Sequence
  Description of Artificial Sequence: Synthetic primer
ctgtgccacttcagtgtgcg

SEQ ID NO: 763 - DNA, 177 bp, Artificial Sequence
  Description of Artificial Sequence: Synthetic polynucleotide
ctgtgccacttcagtgtgcgggtgacaggtgagctctggggccacgccagctacagaaaggagccgagtgccgggctccctgagtccctgcgtgggtcaggagcggctgggggtctctctggtcattggtggagaggagggcacccccaggaagtgctgcccaaatgggggaccctg

SEQ ID NO: 764 - DNA, 80 bp, Artificial Sequence
  Description of Artificial Sequence: Synthetic oligonucleotide
  Description of Combined DNA/RNA Molecule: Synthetic oligonucleotide
tgcccaaaugggggaccctgacgauaacggtacaaggctaaagcuutgctaacggucgagctgtgccacutcagtgtgcg

SEQ ID NO: 765 - DNA, 20 bp, Artificial Sequence
  Description of Artificial Sequence: Synthetic primer
gcggcaatgatatcattgta

SEQ ID NO: 766 - DNA, 20 bp, Artificial Sequence
  Description of Artificial Sequence: Synthetic primer
cttcctttgtcaccgtcact

SEQ ID NO: 767 - DNA, 177 bp, Artificial Sequence
  Description of Artificial Sequence: Synthetic polynucleotide
cttcctttgtcaccgtcactcacgctttttctgtaacccacgcaggccatcatggcgcaactaccgcaggaggagaaggcaaaaatagctgagcaggtggagatattccatcaagagaaaagcaagctggatgcagaagtggccaaatgggacgacagcggcaatgatatcattgta

SEQ ID NO: 768 - DNA, 80 bp, Artificial Sequence
  Description of Artificial Sequence: Synthetic oligonucleotide
  Description of Combined DNA/RNA Molecule: Synthetic oligonucleotide
gcggcaatgauatcattgtaacgauaacggtacaaggctaaagcuutgctaacggucgagcttcctttgucaccgtcact

SEQ ID NO: 769 - DNA, 20 bp, Artificial Sequence
  Description of Artificial Sequence: Synthetic primer
tttcatataaactctggaag

SEQ ID NO: 770 - DNA, 20 bp, Artificial Sequence
  Description of Artificial Sequence: Synthetic primer
cttctggttcttattaagtg

SEQ ID NO: 771 - DNA, 178 bp, Artificial Sequence
  Description of Artificial Sequence: Synthetic polynucleotide
cttctggttcttattaagtgttgatttatcttatgggataaaaacaacaaagaaataatgaccataagatcttttaaaatatatagtgaattagataggttttattaactcggctagtaattatctggtagatttctttgactgatttcatttgtggatttcatataaactctggaag

SEQ ID NO: 772 - DNA, 80 bp, Artificial Sequence
  Description of Artificial Sequence: Synthetic oligonucleotide
  Description of Combined DNA/RNA Molecule: Synthetic oligonucleotide
tttcatauaaactctggaagacgauaacggtacaaggctaaagcuutgctaacggucgagcttctggtucttattaagtg

SEQ ID NO: 773 - DNA, 20 bp, Artificial Sequence
  Description of Artificial Sequence: Synthetic primer
accctccctcctccaactcc

SEQ ID NO: 774 - DNA, 20 bp, Artificial Sequence
  Description of Artificial Sequence: Synthetic primer
ccggactgactgggaccaca

SEQ ID NO: 775 - DNA, 178 bp, Artificial Sequence
  Description of Artificial Sequence: Synthetic polynucleotide
ggagttggaggagggagggtagggggtgagcagagaagctgggaggcagagaacaggagcttgatattaggtccttctatctgtctggttgaatcctttagccctactttcttggccttagctgctacattcacgtccctagtcactcacagtccagctgtggtcccagtcagtccgg

SEQ ID NO: 776 - DNA, 80 bp, Artificial Sequence
  Description of Artificial Sequence: Synthetic oligonucleotide
  Description of Combined DNA/RNA Molecule: Synthetic oligonucleotide
accctcccucctccaactccacgauaacggtacaaggctaaagcuutgctaacggucgagccggactgacugggaccaca

SEQ ID NO: 777 - DNA, 20 bp, Artificial Sequence
  Description of Artificial Sequence: Synthetic primer
ctcaggtgggatggacccat

SEQ ID NO: 778 - DNA, 20 bp, Artificial Sequence
  Description of Artificial Sequence: Synthetic primer
ctccatgaccagctgcagcg

SEQ ID NO: 779 - DNA, 178 bp, Artificial Sequence
  Description of Artificial Sequence: Synthetic polynucleotide
ctccatgaccagctgcagcgacttctcgcctgccgcggagaggggcggccccggtgggggacgatagagggcgggccggggaccgcctaccttgagcccagcagagcccctccaaggtcgggagggaaggccaagacccgcgcacactagacccagttctcaggtgggatggacccat

SEQ ID NO: 780 - DNA, 80 bp, Artificial Sequence
  Description of Artificial Sequence: Synthetic oligonucleotide
  Description of Combined DNA/RNA Molecule: Synthetic oligonucleotide
ctcaggtgggauggacccatacgauaacggtacaaggctaaagcuutgctaacggucgagctccaugaccagctgcagcg

SEQ ID NO: 781 - DNA, 20 bp, Artificial Sequence
  Description of Artificial Sequence: Synthetic primer
tcaacctgcatttattacct

SEQ ID NO: 782 - DNA, 20 bp, Artificial Sequence
  Description of Artificial Sequence: Synthetic primer
cgtccgcaagcagcgagagg

SEQ ID NO: 783 - DNA, 178 bp, Artificial Sequence
  Description of Artificial Sequence: Synthetic polynucleotide
cgtccgcaagcagcgagaggtggcgcagcgtaagtaatgaccctaccccgcatcttccctgggagggcccaggactctcccctaactcataggtgggggctggaagcttcaccatccccattacacagacaggtagatggaaaggaagtcagtgggattcaacctgcatttattacct

SEQ ID NO: 784 - DNA, 80 bp, Artificial Sequence
  Description of Artificial Sequence: Synthetic oligonucleotide
  Description of Combined DNA/RNA Molecule: Synthetic oligonucleotide
tcaacctgcauttattacctacgauaacggtacaaggctaaagcuutgctaacggucgagcguccgcaagcagcgagagg

SEQ ID NO: 785 - DNA, 20 bp, Artificial Sequence
  Description of Artificial Sequence: Synthetic primer
cttcctccacctctttctcc

SEQ ID NO: 786 - DNA, 20 bp, Artificial Sequence
  Description of Artificial Sequence: Synthetic primer
cccaaacacatctaagacta

SEQ ID NO: 787 - DNA, 178 bp, Artificial Sequence
  Description of Artificial Sequence: Synthetic polynucleotide
ggagaaagaggtggaggaagaggacgaggaggaggaggaagccgaaggggctcggcgcgtgtgtgtgcatgtgtgcatgcgtgtgtgagtgcatgtgtgtgagtgctgccgctgcccgcgacccctggccccgaaggtgttggctgaaatatggagaatagtcttagatgtgtttggg

SEQ ID NO: 788 - DNA, 80 bp, Artificial Sequence
  Description of Artificial Sequence: Synthetic oligonucleotide
  Description of Combined DNA/RNA Molecule: Synthetic oligonucleotide
cttcctccaccuctttctccacgauaacggtacaaggctaaagcuutgctaacggucgagcccaaacacauctaagacta

SEQ ID NO: 789 - DNA, 20 bp, Artificial Sequence
  Description of Artificial Sequence: Synthetic primer
ataagatttatcatggctgc

SEQ ID NO: 790 - DNA, 20 bp, Artificial Sequence
  Description of Artificial Sequence: Synthetic primer
cctgccaggatatggaaaaa

SEQ ID NO: 791 - DNA, 178 bp, Artificial Sequence
  Description of Artificial Sequence: Synthetic polynucleotide
cctgccaggatatggaaaaacgagcacaggtaagttacttgtttctaagtgataaaacagcgaagagctattaggaataaaatgaattacagctctgttaatattgattaaattttattaaagacataaggctgtgtttattttggctctatttcaaaataagatttatcatggctgc

SEQ ID NO: 792 - DNA, 80 bp, Artificial Sequence
  Description of Artificial Sequence: Synthetic oligonucleotide
  Description of Combined DNA/RNA Molecule: Synthetic oligonucleotide
ataagattuatcatggctgcacgauaacggtacaaggctaaagcuutgctaacggucgagcctgccaggauatggaaaaa

SEQ ID NO: 793 - DNA, 20 bp, Artificial Sequence
  Description of Artificial Sequence: Synthetic primer
aggctggccaagccaggccc

SEQ ID NO: 794 - DNA, 20 bp, Artificial Sequence
  Description of Artificial Sequence: Synthetic primer
cttcccgttgacatgctcaa

SEQ ID NO: 795 - DNA, 179 bp, Artificial Sequence
  Description of Artificial Sequence: Synthetic polynucleotide
cttcccgttgacatgctcaaactcctgaacctggggtggtgggagggaaggtggaagggaaagagggagggcagtggtggcaactcagccctaagggcctcagggcagccaggggggctgaaagtgtcacaggcttggggtagctgctacctccgcccaaggctggccaagccaggccc

SEQ ID NO: 796 - DNA, 80 bp, Artificial Sequence
  Description of Artificial Sequence: Synthetic oligonucleotide
  Description of Combined DNA/RNA Molecule: Synthetic oligonucleotide
aggcuggccaagccaggcccacgauaacggtacaaggctaaagcuutgctaacggucgagcttcccgtugacatgctcaa

SEQ ID NO: 797 - DNA, 20 bp, Artificial Sequence
  Description of Artificial Sequence: Synthetic primer
gtgcctaattttttgaattt

SEQ ID NO: 798 - DNA, 20 bp, Artificial Sequence
  Description of Artificial Sequence: Synthetic primer
ctgatgacagcgaggaatat

SEQ ID NO: 799 - DNA, 179 bp, Artificial Sequence
  Description of Artificial Sequence: Synthetic polynucleotide
ctgatgacagcgaggaatatccacttcaatctgttaaaatagcaaaataataaggtgaaacagtaattgtgtaatcagcaataaacccttaatccttgttcattaaataaggaaaaggagaagctataatatgaatttcaaaacagaccaacttcttaagtgcctaattttttgaattt

SEQ ID NO: 800 - DNA, 80 bp, Artificial Sequence
  Description of Artificial Sequence: Synthetic oligonucleotide
  Description of Combined DNA/RNA Molecule: Synthetic oligonucleotide
gtgcctaatuttttgaatttacgauaacggtacaaggctaaagcuutgctaacggucgagctgaugacagcgaggaatat

SEQ ID NO: 801 - DNA, 20 bp, Artificial Sequence
  Description of Artificial Sequence: Synthetic primer
gcctgagcccggccctgagc

SEQ ID NO: 802 - DNA, 20 bp, Artificial Sequence
  Description of Artificial Sequence: Synthetic primer
ccttcttacagtcagcggca

SEQ ID NO: 803 - DNA, 179 bp, Artificial Sequence
  Description of Artificial Sequence: Synthetic polynucleotide
ccttcttacagtcagcggcacggacgatcactgtggcaaggaggacaagagcgtgaggccgacgggacagccagcagctcccaggggctgacggccttggctaaagacttgcctggaacactctggggccctcccctgggctcccttcctgtgtgcacagcctgagcccggccctgagc

SEQ ID NO: 804 - DNA, 80 bp, Artificial Sequence
  Description of Artificial Sequence: Synthetic oligonucleotide
  Description of Combined DNA/RNA Molecule: Synthetic oligonucleotide
gcctgagcccggcccugagcacgauaacggtacaaggctaaagcuutgctaacggucgagccttcttacagucagcggca

SEQ ID NO: 805 - DNA, 20 bp, Artificial Sequence
  Description of Artificial Sequence: Synthetic primer
gactataagtttcatagcca

SEQ ID NO: 806 - DNA, 20 bp, Artificial Sequence
  Description of Artificial Sequence: Synthetic primer
cttgtggaagatgaaaatgt

SEQ ID NO: 807 - DNA, 179 bp, Artificial Sequence
  Description of Artificial Sequence: Synthetic polynucleotide
tggctatgaaacttatagtcaatttccaaataattgtttcatgaaagaaaaattgcatagctaattttaccacatgctaagggtgactttagagcttaggtaaacaatgaaatccttcgttgttgaataccttcaacaataagtttagcagtcgttttgacattttcatcttccacaag

SEQ ID NO: 808 - DNA, 80 bp, Artificial Sequence
  Description of Artificial Sequence: Synthetic oligonucleotide
  Description of Combined DNA/RNA Molecule: Synthetic oligonucleotide
gactataaguttcatagccaacgauaacggtacaaggctaaagcuutgctaacggucgagcttgtggaagaugaaaatgt

SEQ ID NO: 809 - DNA, 20 bp, Artificial Sequence
  Description of Artificial Sequence: Synthetic primer
agatgcatatcaaatgagta

SEQ ID NO: 810 - DNA, 20 bp, Artificial Sequence
  Description of Artificial Sequence: Synthetic primer
caaacttaatttttagcctg

SEQ ID NO: 811 - DNA, 179 bp, Artificial Sequence
  Description of Artificial Sequence: Synthetic polynucleotide
caaacttaatttttagcctgattcccagctaagtgtgatgccttcaaacatccctattataaagcttctctctgttctttgtgacacacaggcaccactagcagacgctgctctctcagtcttcatggagtggccttctgggaacagccgagctttgcaagatgcatatcaaatgagta

SEQ ID NO: 812 - DNA, 80 bp, Artificial Sequence
  Description of Artificial Sequence: Synthetic oligonucleotide
  Description of Combined DNA/RNA Molecule: Synthetic oligonucleotide
agatgcataucaaatgagtaacgauaacggtacaaggctaaagcuutgctaacggucgagcaaacttaauttttagcctg

SEQ ID NO: 813 - DNA, 20 bp, Artificial Sequence
  Description of Artificial Sequence: Synthetic primer
aagcatcattccatacagta

SEQ ID NO: 814 - DNA, 20 bp, Artificial Sequence
  Description of Artificial Sequence: Synthetic primer
ctggtttaagaatcatcaac

SEQ ID NO: 815 - DNA, 179 bp, Artificial Sequence
  Description of Artificial Sequence: Synthetic polynucleotide
ctggtttaagaatcatcaacaagagaggaaccggagcagcttgaaaccgtggagaagtatggaaattcctaatagctcttatggaagcagggcttagaggatgcaatactgacagactagggactgctgtaacttcttttattagcagctgtcttgaaaaagcatcattccatacagta

SEQ ID NO: 816 - DNA, 80 bp, Artificial Sequence
  Description of Artificial Sequence: Synthetic oligonucleotide
  Description of Combined DNA/RNA Molecule: Synthetic oligonucleotide
aagcatcatuccatacagtaacgauaacggtacaaggctaaagcuutgctaacggucgagctggttuaagaatcatcaac

SEQ ID NO: 817 - DNA, 20 bp, Artificial Sequence
  Description of Artificial Sequence: Synthetic primer
tctccagttcttggatggaa

SEQ ID NO: 818 - DNA, 20 bp, Artificial Sequence
  Description of Artificial Sequence: Synthetic primer
ccatggctgcttgtcgaact

SEQ ID NO: 819 - DNA, 179 bp, Artificial Sequence
  Description of Artificial Sequence: Synthetic polynucleotide
ccatggctgcttgtcgaacttgaccgtgggctgcaggggaggcagcggttcagacacgccccagatcctgggccaccagagtccacactacaggcctttgcacatgcaattccttctgcctggaacactcttcccactcctgtctgtcttcctaactcttctccagttcttggatggaa

SEQ ID NO: 820 - DNA, 80 bp, Artificial Sequence
  Description of Artificial Sequence: Synthetic oligonucleotide
  Description of Combined DNA/RNA Molecule: Synthetic oligonucleotide
tctccagtucttggatggaaacgauaacggtacaaggctaaagcuutgctaacggucgagccatggctgcutgtcgaact

SEQ ID NO: 821 - DNA, 20 bp, Artificial Sequence
  Description of Artificial Sequence: Synthetic primer
taacggatgacgtgcgggtt

SEQ ID NO: 822 - DNA, 20 bp, Artificial Sequence
  Description of Artificial Sequence: Synthetic primer
caggtttccagcaaaggaac

SEQ ID NO: 823 - DNA, 180 bp, Artificial Sequence
  Description of Artificial Sequence: Synthetic polynucleotide
caggtttccagcaaaggaaccaactccacattcaaccgggttgtgctgaagaggttgtttatgagtcgcaacaaccggccacctctgcccctttcccggatgatctggaagatgaagcttcctggccgggaaaacaaaacagccgtggttgtgggggccataacggatgacgtgcgggtt

SEQ ID NO: 824 - DNA, 80 bp, Artificial Sequence
  Description of Artificial Sequence: Synthetic oligonucleotide
  Description of Combined DNA/RNA Molecule: Synthetic oligonucleotide
taacggaugacgtgcgggttacgauaacggtacaaggctaaagcuutgctaacggucgagcaggttuccagcaaaggaac

SEQ ID NO: 825 - DNA, 20 bp, Artificial Sequence
  Description of Artificial Sequence: Synthetic primer
cttaaagtttgtgaaacaca

SEQ ID NO: 826 - DNA, 20 bp, Artificial Sequence
  Description of Artificial Sequence: Synthetic primer
ccagcagcacagccgcagca

SEQ ID NO: 827 - DNA, 180 bp, Artificial Sequence
  Description of Artificial Sequence: Synthetic polynucleotide
tgtgtttcacaaactttaaggagacagaaattttctcccctggaacctgtgaaaatgtcccttttccaaggaagtgaaggttaagaggtcccgttctcacagaccctcaggaatttcacttggctccgagctttgacctccgagagagccatggaaaagctgctgcggctgtgctgctgg

SEQ ID NO: 828 - DNA, 80 bp, Artificial Sequence
  Description of Artificial Sequence: Synthetic oligonucleotide
  Description of Combined DNA/RNA Molecule: Synthetic oligonucleotide
cttaaagttugtgaaacacaacgauaacggtacaaggctaaagcuutgctaacggucgagccagcagcacagccgcagca

SEQ ID NO: 829 - DNA, 20 bp, Artificial Sequence
  Description of Artificial Sequence: Synthetic primer
tctttttttttttggccatt

SEQ ID NO: 830 - DNA, 20 bp, Artificial Sequence
  Description of Artificial Sequence: Synthetic primer
ccaggatcaccacaactttc

SEQ ID NO: 831 - DNA, 180 bp, Artificial Sequence
  Description of Artificial Sequence: Synthetic polynucleotide
ccaggatcaccacaactttctttctcaatttctggaaaaatagaagataaaagtcaccttccaagggttgcaggcatatgatacccataatacaagttaggtagatatatgctctttgttgtggagatatttcagaacaaaaaataaatatattctccaatctttttttttttggccatt

SEQ ID NO: 832 - DNA, 80 bp, Artificial Sequence
  Description of Artificial Sequence: Synthetic oligonucleotide
  Description of Combined DNA/RNA Molecule: Synthetic oligonucleotide
tctttttttutttggccattacgauaacggtacaaggctaaagcuutgctaacggucgagccaggaucaccacaactttc

SEQ ID NO: 833 - DNA, 20 bp, Artificial Sequence
  Description of Artificial Sequence: Synthetic primer
gccctgtgtaggggaaaggc

SEQ ID NO: 834 - DNA, 20 bp, Artificial Sequence
  Description of Artificial Sequence: Synthetic primer
catcatcaaagacaagcaca

SEQ ID NO: 835 - DNA, 180 bp, Artificial Sequence
  Description of Artificial Sequence: Synthetic polynucleotide
catcatcaaagacaagcacatcctcgccaaggtaacgtgtccctgtgggaaatgccaggccatgggccgagtgctcacacgtgggtcacgctgcccgtctcctccaaagcccctacaagtttcttcccggagtcccacctgcatgtgcgtgaagacagctgccctgtgtaggggaaaggc

SEQ ID NO: 836 - DNA, 80 bp, Artificial Sequence
  Description of Artificial Sequence: Synthetic oligonucleotide
  Description of Combined DNA/RNA Molecule: Synthetic oligonucleotide
gccctgtguaggggaaaggcacgauaacggtacaaggctaaagcuutgctaacggucgagcatcaucaaagacaagcaca

SEQ ID NO: 837 - DNA, 20 bp, Artificial Sequence
  Description of Artificial Sequence: Synthetic primer
ttaccacggatttttcctct

SEQ ID NO: 838 - DNA, 20 bp, Artificial Sequence
  Description of Artificial Sequence: Synthetic primer
cagggacaccagccactcca

SEQ ID NO: 839 - DNA, 180 bp, Artificial Sequence
  Description of Artificial Sequence: Synthetic polynucleotide
agaggaaaaatccgtggtaaaggcagtagagggtgggatgtggcttaggcagaactcgtggctggcggtgtcttgactctctgaagtgggaggaccctctggtgtccgacccggccttcagtcctggcgtggccgcatctgtccttgcagatcaaaggtttggagtggctggtgtccctg

SEQ ID NO: 840 - DNA, 80 bp, Artificial Sequence
  Description of Artificial Sequence: Synthetic oligonucleotide
  Description of Combined DNA/RNA Molecule: Synthetic oligonucleotide
ttaccacggauttttcctctacgauaacggtacaaggctaaagcuutgctaacggucgagcagggacaccagccacucca

SEQ ID NO: 841 - DNA, 20 bp, Artificial Sequence
  Description of Artificial Sequence: Synthetic primer
tcatagagtagtgggtggta

SEQ ID NO: 842 - DNA, 20 bp, Artificial Sequence
  Description of Artificial Sequence: Synthetic primer
ccttattgcacattgattcc

SEQ ID NO: 843 - DNA, 180 bp, Artificial Sequence
  Description of Artificial Sequence: Synthetic polynucleotide
ccttattgcacattgattcccaagaaaccctttttaagagtgtggaatgactggacttggtgcagggcagtgcaccgcctggaagccgggaagaaccaccttgcccttgcgatgcaaatccccctgcgtgcccatgttcaggcgctgcaccaggagcttctcatagagtagtgggtggta

SEQ ID NO: 844 - DNA, 80 bp, Artificial Sequence
  Description of Artificial Sequence: Synthetic oligonucleotide
  Description of Combined DNA/RNA Molecule: Synthetic oligonucleotide
tcatagaguagtgggtggtaacgauaacggtacaaggctaaagcuutgctaacggucgagccttatugcacattgattcc

SEQ ID NO: 845 - DNA, 20 bp, Artificial Sequence
  Description of Artificial Sequence: Synthetic primer
agccccctaccccagggccc

SEQ ID NO: 846 - DNA, 20 bp, Artificial Sequence
  Description of Artificial Sequence: Synthetic primer
ccctcaggacaacatgcacc

SEQ ID NO: 847 - DNA, 180 bp, Artificial Sequence
  Description of Artificial Sequence: Synthetic polynucleotide
ccctcaggacaacatgcaccagatgcacaaggtagggatccctgtgcccgcctcgcacctgcggcctctgcccactagggctgcaggcagcctctggaccgagggccttacttggaggatggggggaagccttcttgttggaggtgtcctgccttggctcagccccctaccccagggccc

SEQ ID NO: 848 - DNA, 80 bp, Artificial Sequence
  Description of Artificial Sequence: Synthetic oligonucleotide
  Description of Combined DNA/RNA Molecule: Synthetic oligonucleotide
agcccccuaccccagggcccacgauaacggtacaaggctaaagcuutgctaacggucgagccctcaggacaacaugcacc

SEQ ID NO: 849 - DNA, 20 bp, Artificial Sequence
  Description of Artificial Sequence: Synthetic primer
gccctttgatgtcattcatc

SEQ ID NO: 850 - DNA, 20 bp, Artificial Sequence
  Description of Artificial Sequence: Synthetic primer
catgaggttttctatggatt

SEQ ID NO: 851 - DNA, 180 bp, Artificial Sequence
  Description of Artificial Sequence: Synthetic polynucleotide
catgaggttttctatggatttctggcaaaaggtatcaacatacttttacattttgaaatgatctgacttatgaaagaccattgtaattctagctttttctgttgtgtccatgttctttttcctttacaaatctaccctgatgttttgtattgattactttgccctttgatgtcattcatc

SEQ ID NO: 852 - DNA, 80 bp, Artificial Sequence
  Description of Artificial Sequence: Synthetic oligonucleotide
  Description of Combined DNA/RNA Molecule: Synthetic oligonucleotide
gccctttgaugtcattcatcacgauaacggtacaaggctaaagcuutgctaacggucgagcatgaggttutctatggatt

SEQ ID NO: 853 - DNA, 20 bp, Artificial Sequence
  Description of Artificial Sequence: Synthetic primer
cttctttcaaatctggctaa

SEQ ID NO: 854 - DNA, 20 bp, Artificial Sequence
  Description of Artificial Sequence: Synthetic primer
ctattgtatatggtatattt

SEQ ID NO: 855 - DNA, 181 bp, Artificial Sequence
  Description of Artificial Sequence: Synthetic polynucleotide
ttagccagatttgaaagaagaaaagtttaaagggtggcataggataattaacttaatgtttggcataaagccctgcttttttgccatgctgtatttttttctcttgcttttgatctagaattacttacctgtgtgtttctctctatgcagatgaatctataaaatataccatatacaatag

SEQ ID NO: 856 - DNA, 80 bp, Artificial Sequence
  Description of Artificial Sequence: Synthetic oligonucleotide
  Description of Combined DNA/RNA Molecule: Synthetic oligonucleotide
cttctttcaaauctggctaaacgauaacggtacaaggctaaagcuutgctaacggucgagctattgtauatggtatattt

SEQ ID NO: 857 - DNA, 20 bp, Artificial Sequence
  Description of Artificial Sequence: Synthetic primer
atacgatggcttcatgtgta

SEQ ID NO: 858 - DNA, 20 bp, Artificial Sequence
  Description of Artificial Sequence: Synthetic primer
caaattgtatttacataatt

SEQ ID NO: 859 - DNA, 181 bp, Artificial Sequence
  Description of Artificial Sequence: Synthetic polynucleotide
caaattgtatttacataattacacactttgtctttgacttctttttcttctttttaccatctttgctcatcttttctttatgttttcgaatttctcgaactaatgtatagaaggcatcatcaacaccctgaaatacataaaaagtattaaaatgtgaatatatacgatggcttcatgtgta

SEQ ID NO: 860 - DNA, 80 bp, Artificial Sequence
  Description of Artificial Sequence: Synthetic oligonucleotide
  Description of Combined DNA/RNA Molecule: Synthetic oligonucleotide
atacgatggcutcatgtgtaacgauaacggtacaaggctaaagcuutgctaacggucgagcaaattgtauttacataatt

SEQ ID NO: 861 - DNA, 20 bp, Artificial Sequence
  Description of Artificial Sequence: Synthetic primer
tggggtaaaagggcacacca

SEQ ID NO: 862 - DNA, 20 bp, Artificial Sequence
  Description of Artificial Sequence: Synthetic primer
cagaatccccatcttgctgc

SEQ ID NO: 863 - DNA, 181 bp, Artificial Sequence
  Description of Artificial Sequence: Synthetic polynucleotide
cagaatccccatcttgctgctgtctcggggacctgtgaacaataaggctttcgtgatttttcagaaaacatcccttttctactctaagttctctaccaacccactctccacctccagccaaaatcttcacgtgcacgtgtgtcatcacctaagttacacaatggggtaaaagggcacacca

SEQ ID NO: 864 - DNA, 80 bp, Artificial Sequence
  Description of Artificial Sequence: Synthetic oligonucleotide
  Description of Combined DNA/RNA Molecule: Synthetic oligonucleotide
tgggguaaaagggcacaccaacgauaacggtacaaggctaaagcuutgctaacggucgagcagaatccccaucttgctgc

SEQ ID NO: 865 - DNA, 20 bp, Artificial Sequence
  Description of Artificial Sequence: Synthetic primer
atatctttcaaatcgttggc

SEQ ID NO: 866 - DNA, 20 bp, Artificial Sequence
  Description of Artificial Sequence: Synthetic primer
cagcagaaagaggtagctct

SEQ ID NO: 867 - DNA, 181 bp, Artificial Sequence
  Description of Artificial Sequence: Synthetic polynucleotide
gccaacgatttgaaagatatatagacctacaatattttattgaatttgtttatagaacctttttctatatgccccgtccctcctttcggatgcaaagctgtcttgcctgaagatatgttttaaaccacgtttttcctctctttcatacagagcaaggctaaagagctacctctttctgctg

SEQ ID NO: 868 - DNA, 80 bp, Artificial Sequence
  Description of Artificial Sequence: Synthetic oligonucleotide
  Description of Combined DNA/RNA Molecule: Synthetic oligonucleotide
atatcttucaaatcgttggcacgauaacggtacaaggctaaagcuutgctaacggucgagcagcagaaagagguagctct

SEQ ID NO: 869 - DNA, 20 bp, Artificial Sequence
  Description of Artificial Sequence: Synthetic primer
gagtcttgctctgtcgccca

SEQ ID NO: 870 - DNA, 20 bp, Artificial Sequence
  Description of Artificial Sequence: Synthetic primer
ctcggagacagcgactgcga

SEQ ID NO: 871 - DNA, 181 bp, Artificial Sequence
  Description of Artificial Sequence: Synthetic polynucleotide
ctcggagacagcgactgcgattgcttacgagcagcacgggttctttgagcaggtaaacctcagaccactgacggtcttgggtgtgtaatgagaggtcatttataacggttctttaataaaatgtcctcaagtcggagttcacgttctctttttttgagatggagtcttgctctgtcgccca

SEQ ID NO: 872 - DNA, 80 bp, Artificial Sequence
  Description of Artificial Sequence: Synthetic oligonucleotide
  Description of Combined DNA/RNA Molecule: Synthetic oligonucleotide
gagtcttgcuctgtcgcccaacgauaacggtacaaggctaaagcuutgctaacggucgagctcggagacagcgacugcga

SEQ ID NO: 873 - DNA, 20 bp, Artificial Sequence
  Description of Artificial Sequence: Synthetic primer
ctgagggaagtggacggcac

SEQ ID NO: 874 - DNA, 20 bp, Artificial Sequence
  Description of Artificial Sequence: Synthetic primer
ccttatgtataatggataag

SEQ ID NO: 875 - DNA, 181 bp, Artificial Sequence
  Description of Artificial Sequence: Synthetic polynucleotide
ccttatgtataatggataagcccaaaattgaaagtcagatctgatttgcttacggccttcaccaaacaatcccagtggctcaatgtctttcgcagatcgcagacctcggccttgcctcctttaagatgtggagcaaactgaataatgaagagcacaatgagctgagggaagtggacggcac

SEQ ID NO: 876 - DNA, 80 bp, Artificial Sequence
  Description of Artificial Sequence: Synthetic oligonucleotide
  Description of Combined DNA/RNA Molecule: Synthetic oligonucleotide
ctgagggaaguggacggcacacgauaacggtacaaggctaaagcuutgctaacggucgagccttatgtauaatggataag

SEQ ID NO: 877 - DNA, 20 bp, Artificial Sequence
  Description of Artificial Sequence: Synthetic primer
tgcataccttggcaatctgc

SEQ ID NO: 878 - DNA, 20 bp, Artificial Sequence
  Description of Artificial Sequence: Synthetic primer
cgagccgcacatcctccagg

SEQ ID NO: 879 - DNA, 181 bp, Artificial Sequence
  Description of Artificial Sequence: Synthetic polynucleotide
gcagattgccaaggtatgcacctgggctctttgcaggtctctccggagcaaacccctatgtccacaaggggctaggatggggactcttgctgggcatgtggccaggcccaggccctcccagaaggtctacatgggtgcttcccattccaggggatgagctacctggaggatgtgcggctcg

SEQ ID NO: 880 - DNA, 80 bp, Artificial Sequence
  Description of Artificial Sequence: Synthetic oligonucleotide
  Description of Combined DNA/RNA Molecule: Synthetic oligonucleotide
tgcatacctuggcaatctgcacgauaacggtacaaggctaaagcuutgctaacggucgagcgagccgcacaucctccagg

SEQ ID NO: 881 - DNA, 20 bp, Artificial Sequence
  Description of Artificial Sequence: Synthetic primer
tctcagcttcctggaagtat

SEQ ID NO: 882 - DNA, 20 bp, Artificial Sequence
  Description of Artificial Sequence: Synthetic primer
ctcttcagccacaagtgggt

SEQ ID NO: 883 - DNA, 182 bp, Artificial Sequence
  Description of Artificial Sequence: Synthetic polynucleotide
atacttccaggaagctgagattcagctctacactccatggaagctttgtcaacgcaagcaaaatatacatccctgtgaaaagatacagtattcttacctcattataattttaataactggtagtatctgactgtttgttcattatttcagagatcccagaagacccacttgtggctgaagag

SEQ ID NO: 884 - DNA, 80 bp, Artificial Sequence
  Description of Artificial Sequence: Synthetic oligonucleotide
  Description of Combined DNA/RNA Molecule: Synthetic oligonucleotide
tctcagctucctggaagtatacgauaacggtacaaggctaaagcuutgctaacggucgagctcttcagccacaagugggt

SEQ ID NO: 885 - DNA, 20 bp, Artificial Sequence
  Description of Artificial Sequence: Synthetic primer
cctgtggtttctgctgctcc

SEQ ID NO: 886 - DNA, 20 bp, Artificial Sequence
  Description of Artificial Sequence: Synthetic primer
ccacgccgcgccgtgggacc

SEQ ID NO: 887 - DNA, 182 bp, Artificial Sequence
  Description of Artificial Sequence: Synthetic polynucleotide
ccacgccgcgccgtgggaccctccagcactcaggttctcgtcccttgagccccgcctgcaccctctccctggggggacccaccctgagctgtgagcgggtggggctggtgaggcccgggttaaatgaggtcctcgctgcctgctcaggcagagaaagtggcgcctgtggtttctgctgctcc

SEQ ID NO: 888 - DNA, 80 bp, Artificial Sequence
  Description of Artificial Sequence: Synthetic oligonucleotide
  Description of Combined DNA/RNA Molecule: Synthetic oligonucleotide
cctgtggttuctgctgctccacgauaacggtacaaggctaaagcuutgctaacggucgagccacgccgcgccgugggacc

SEQ ID NO: 889 - DNA, 20 bp, Artificial Sequence
  Description of Artificial Sequence: Synthetic primer
atacaaacaaaacagtcata

SEQ ID NO: 890 - DNA, 20 bp, Artificial Sequence
  Description of Artificial Sequence: Synthetic primer
catattattctatttgcagc

SEQ ID NO: 891 - DNA, 182 bp, Artificial Sequence
  Description of Artificial Sequence: Synthetic polynucleotide
tatgactgttttgtttgtatctgaggaattataatcattccattgtctagatttgtgcataaattctgtttttctctttgtttttctaactctgagaagtttaaatgttgggtagttccttatgtaatgttttttgttttttattaataggatcgaacagaggctgcaaatagaataatatg

SEQ ID NO: 892 - DNA, 80 bp, Artificial Sequence
  Description of Artificial Sequence: Synthetic oligonucleotide
  Description of Combined DNA/RNA Molecule: Synthetic oligonucleotide
atacaaacaaaacagucataacgauaacggtacaaggctaaagcuutgctaacggucgagcatattatuctatttgcagc

SEQ ID NO: 893 - DNA, 20 bp, Artificial Sequence
  Description of Artificial Sequence: Synthetic primer
tatgctttctaggtcctaat

SEQ ID NO: 894 - DNA, 20 bp, Artificial Sequence
  Description of Artificial Sequence: Synthetic primer
cagatgcaggtggtgcagca

SEQ ID NO: 895 - DNA, 182 bp, Artificial Sequence
  Description of Artificial Sequence: Synthetic polynucleotide
cagatgcaggtggtgcagcagctggagatccaggtgtggcccggaagatgctggggagggacatggtgggctccagcccctgcccacccacagcactgacttgctaggtgggctctgttgggagggtctcatggaagggtcctatggtcaaagccaccatcttatgctttctaggtcctaat

SEQ ID NO: 896 - DNA, 80 bp, Artificial Sequence
  Description of Artificial Sequence: Synthetic oligonucleotide
  Description of Combined DNA/RNA Molecule: Synthetic oligonucleotide
tatgctttcuaggtcctaatacgauaacggtacaaggctaaagcuutgctaacggucgagcagatgcagguggtgcagca

SEQ ID NO: 897 - DNA, 20 bp, Artificial Sequence
  Description of Artificial Sequence: Synthetic primer
ggctgattttcaaaactgga

SEQ ID NO: 898 - DNA, 20 bp, Artificial Sequence
  Description of Artificial Sequence: Synthetic primer
ctgggccacctcgggcttgt

SEQ ID NO: 899 - DNA, 182 bp, Artificial Sequence
  Description of Artificial Sequence: Synthetic polynucleotide
tccagttttgaaaatcagccctggatctccaactgctgcccagtctggctgttcagcaggccccatgcccccctttccccagtcttgaggcctgggactagggctgtcaggcacgtctgccacgtctgcccctctctcccctgcggccagccctctacagccacaagcccgaggtggcccag

SEQ ID NO: 900 - DNA, 80 bp, Artificial Sequence
  Description of Artificial Sequence: Synthetic oligonucleotide
  Description of Combined DNA/RNA Molecule: Synthetic oligonucleotide
ggctgatttucaaaactggaacgauaacggtacaaggctaaagcuutgctaacggucgagctgggccaccucgggcttgt

SEQ ID NO: 901 - DNA, 20 bp, Artificial Sequence
  Description of Artificial Sequence: Synthetic primer
gtttatgaatatgatttgtt

SEQ ID NO: 902 - DNA, 20 bp, Artificial Sequence
  Description of Artificial Sequence: Synthetic primer
ctcggagatcggggccatca

SEQ ID NO: 903 - DNA, 183 bp, Artificial Sequence
  Description of Artificial Sequence: Synthetic polynucleotide
ctcggagatcggggccatcaccaggtcagccaaggtatgtctgtggacgctgaggagtgggcctggtctcgctgcagccacgggatctttatcggtcatcctcgaggaacacgagccctattaagtaaaatgcccaagtgctgcctgcattctctgctctggagtttatgaatatgatttgtt

SEQ ID NO: 904 - DNA, 80 bp, Artificial Sequence
  Description of Artificial Sequence: Synthetic oligonucleotide
  Description of Combined DNA/RNA Molecule: Synthetic oligonucleotide
gtttatgaauatgatttgttacgauaacggtacaaggctaaagcuutgctaacggucgagctcggagaucggggccatca

SEQ ID NO: 905 - DNA, 20 bp, Artificial Sequence
  Description of Artificial Sequence: Synthetic primer
acctctctgtctgcatgaca

SEQ ID NO: 906 - DNA, 20 bp, Artificial Sequence
  Description of Artificial Sequence: Synthetic primer
ctgtttaatttgaaatattg

SEQ ID NO: 907 - DNA, 183 bp, Artificial Sequence
  Description of Artificial Sequence: Synthetic polynucleotide
tgtcatgcagacagagaggtccttaagatagtccctgacaagtagttaagtcctcaatgaatggtagttgctgctttcattattattattattcatggtagtagtatcagtagtaaaagtatttattcccatatgtcattttcatttcagctccctgaaagggcaatatttcaaattaaacag

SEQ ID NO: 908 - DNA, 80 bp, Artificial Sequence
  Description of Artificial Sequence: Synthetic oligonucleotide
  Description of Combined DNA/RNA Molecule: Synthetic oligonucleotide
acctctctguctgcatgacaacgauaacggtacaaggctaaagcuutgctaacggucgagctgtttaatutgaaatattg

SEQ ID NO: 909 - DNA, 20 bp, Artificial Sequence
  Description of Artificial Sequence: Synthetic primer
catgggctccacctggctgg

SEQ ID NO: 910 - DNA, 20 bp, Artificial Sequence
  Description of Artificial Sequence: Synthetic primer
ctcctgttccaggctctcga

SEQ ID NO: 911 - DNA, 183 bp, Artificial Sequence
  Description of Artificial Sequence: Synthetic polynucleotide
ccagccaggtggagcccatggctccttcttatggtcttgatcctcctgacagcatcttcatccccagagcccgactgaaagggctttccagggataccagtcggcagtggcagatgccaagtctgagcctcaaacttttcctgctcacaggtctgcagcgtcctcgagagcctggaacaggag

SEQ ID NO: 912 - DNA, 80 bp, Artificial Sequence
  Description of Artificial Sequence: Synthetic oligonucleotide
  Description of Combined DNA/RNA Molecule: Synthetic oligonucleotide
catgggcuccacctggctggacgauaacggtacaaggctaaagcuutgctaacggucgagctcctgtuccaggctctcga

SEQ ID NO: 913 - DNA, 20 bp, Artificial Sequence
  Description of Artificial Sequence: Synthetic primer
ttggtgtcaaaggaattgca

SEQ ID NO: 914 - DNA, 20 bp, Artificial Sequence
  Description of Artificial Sequence: Synthetic primer
ccgagcaattgtgtggaatt

SEQ ID NO: 915 - DNA, 183 bp, Artificial Sequence
  Description of Artificial Sequence: Synthetic polynucleotide
tgcaattcctttgacaccaacctcatagaaaagcagcatgacttgagcagctggtgtcagtcccatcttattttactgtgatctgagcagtatttggcctgttgaagaagaataattctgtcttccctcttgaatttctcttcccgttaggttttcgttctcaaattccacacaattgctcgg

SEQ ID NO: 916 - DNA, 80 bp, Artificial Sequence
  Description of Artificial Sequence: Synthetic oligonucleotide
  Description of Combined DNA/RNA Molecule: Synthetic oligonucleotide
ttggtgucaaaggaattgcaacgauaacggtacaaggctaaagcuutgctaacggucgagccgagcaatugtgtggaatt

SEQ ID NO: 917 - DNA, 20 bp, Artificial Sequence
  Description of Artificial Sequence: Synthetic primer
gagggcgcacacaccgtcca

SEQ ID NO: 918 - DNA, 20 bp, Artificial Sequence
  Description of Artificial Sequence: Synthetic primer
cttgtcggtggggtgcacaa

SEQ ID NO: 919 - DNA, 183 bp, Artificial Sequence
  Description of Artificial Sequence: Synthetic polynucleotide
tggacggtgtgtgcgccctcatgtgtgactttcagaatgcagcaaaggtttgaaggctggcctggctttggccaccatcgtgtgagtcagaccagaagccaggcgttttgcatgcaatatggaacacctctgctctttcggccaccacagtattcctggaagcttgtgcaccccaccgacaag

SEQ ID NO: 920 - DNA, 80 bp, Artificial Sequence
  Description of Artificial Sequence: Synthetic oligonucleotide
  Description of Combined DNA/RNA Molecule: Synthetic oligonucleotide
gagggcgcacacaccguccaacgauaacggtacaaggctaaagcuutgctaacggucgagcttgtcgguggggtgcacaa

SEQ ID NO: 921 - DNA, 20 bp, Artificial Sequence
  Description of Artificial Sequence: Synthetic primer
agctctagaagcccagcggc

SEQ ID NO: 922 - DNA, 20 bp, Artificial Sequence
  Description of Artificial Sequence: Synthetic primer
cacctggaggagctgctccc

SEQ ID NO: 923 - DNA, 183 bp, Artificial Sequence
  Description of Artificial Sequence: Synthetic polynucleotide
cacctggaggagctgctcccgggccatcccacaggtgccacgctcgcctggctcttcccctccagccacaccctgccaggcccctgccacaccacacccctgcccctgccatgcctggcccactctcctcccagttctcaccccacagcagggcgggatcactagctctagaagcccagcggc

SEQ ID NO: 924 - DNA, 80 bp, Artificial Sequence
  Description of Artificial Sequence: Synthetic oligonucleotide
  Description of Combined DNA/RNA Molecule: Synthetic oligonucleotide
agctcuagaagcccagcggcacgauaacggtacaaggctaaagcuutgctaacggucgagcacctggaggagcugctccc

SEQ ID NO: 925 - DNA, 20 bp, Artificial Sequence
  Description of Artificial Sequence: Synthetic primer
aaaacaacacagaagcatat

SEQ ID NO: 926 - DNA, 20 bp, Artificial Sequence
  Description of Artificial Sequence: Synthetic primer
ctgagggctgctgccggagg

SEQ ID NO: 927 - DNA, 184 bp, Artificial Sequence
  Description of Artificial Sequence: Synthetic polynucleotide
atatgcttctgtgttgtttttttaaacaaccctttaaaaacataaaagccatttgtgtggctctggtgccaaacaggcgtcctgagctgccccagtgctgtggcctgccggcgcctccgcaggtaacgcgggtgctttctctctgcacagatggacgtgcacatcctccggcagcagccctcag

SEQ ID NO: 928 - DNA, 80 bp, Artificial Sequence
  Description of Artificial Sequence: Synthetic oligonucleotide
  Description of Combined DNA/RNA Molecule: Synthetic oligonucleotide
aaaacaacacagaagcauatacgauaacggtacaaggctaaagcuutgctaacggucgagctgagggcugctgccggagg

SEQ ID NO: 929 - DNA, 20 bp, Artificial Sequence
  Description of Artificial Sequence: Synthetic primer
tatttttcagtatctctgta

SEQ ID NO: 930 - DNA, 20 bp, Artificial Sequence
  Description of Artificial Sequence: Synthetic primer
cctgaagtcaggcgacgggg

SEQ ID NO: 931 - DNA, 184 bp, Artificial Sequence
  Description of Artificial Sequence: Synthetic polynucleotide
cctgaagtcaggcgacggggagggcacgccagtggagcatgtgcgctgcttccagccgcccatccaccagtccctcgccagcagctgagggcacgcgctgcactccgtaactcaacatggcatgcctttctctccgtaaactatttagtgagatttttagggactatttttcagtatctctgta

SEQ ID NO: 932 - DNA, 80 bp, Artificial Sequence
  Description of Artificial Sequence: Synthetic oligonucleotide
  Description of Combined DNA/RNA Molecule: Synthetic oligonucleotide
tatttttcaguatctctgtaacgauaacggtacaaggctaaagcuutgctaacggucgagcctgaagucaggcgacgggg

SEQ ID NO: 933 - DNA, 20 bp, Artificial Sequence
  Description of Artificial Sequence: Synthetic primer
ttttccttccttcttctact

SEQ ID NO: 934 - DNA, 20 bp, Artificial Sequence
  Description of Artificial Sequence: Synthetic primer
catcttcagagtccttaact

SEQ ID NO: 935 - DNA, 184 bp, Artificial Sequence
  Description of Artificial Sequence: Synthetic polynucleotide
catcttcagagtccttaactcttttaatttgttctctgggaaagaaaaaaaagttatagcacagtcattagtaacacaaatatctttcaaaacctgtccacaacttttgtcataaaatttggctgaaagaaaacaatgtaattcctagtttccactacaccaaattttccttccttcttctact

SEQ ID NO: 936 - DNA, 80 bp, Artificial Sequence
  Description of Artificial Sequence: Synthetic oligonucleotide
  Description of Combined DNA/RNA Molecule: Synthetic oligonucleotide
ttttccttccutcttctactacgauaacggtacaaggctaaagcuutgctaacggucgagcatcttcagaguccttaact

SEQ ID NO: 937 - DNA, 20 bp, Artificial Sequence
  Description of Artificial Sequence: Synthetic primer
gaggccacttgccctctaag

SEQ ID NO: 938 - DNA, 20 bp, Artificial Sequence
  Description of Artificial Sequence: Synthetic primer
ctccttgcgggtcacaaaca

SEQ ID NO: 939 - DNA, 184 bp, Artificial Sequence
  Description of Artificial Sequence: Synthetic polynucleotide
ctccttgcgggtcacaaacacatccaccagctgtaggatgttgggatgcttcaccctggcgacagggaggggagccagtagttagggctggatgaacccctgggagaggctgtggtcaccacagtggccacagcagactaattggccagaggctgggactgcctgaggccacttgccctctaag

SEQ ID NO: 940 - DNA, 80 bp, Artificial Sequence
  Description of Artificial Sequence: Synthetic oligonucleotide
  Description of Combined DNA/RNA Molecule: Synthetic oligonucleotide
gaggccactugccctctaagacgauaacggtacaaggctaaagcuutgctaacggucgagctccttgcgggucacaaaca

SEQ ID NO: 941 - DNA, 20 bp, Artificial Sequence
  Description of Artificial Sequence: Synthetic primer
ccaaggtaatgttagcagta

SEQ ID NO: 942 - DNA, 20 bp, Artificial Sequence
  Description of Artificial Sequence: Synthetic primer
catactagtgccaagtgtgg

SEQ ID NO: 943 - DNA, 184 bp, Artificial Sequence
  Description of Artificial Sequence: Synthetic polynucleotide
catactagtgccaagtgtggccattcccctggccattgctttactcttcttcttcatttgcgtctgtcggaataaccagaagtcatcgtcggcaccagtccagaggcaaccaaaacacgtcagaggtcaaaatgtagagatgtcaatgctgaatgcatataaacccaaggtaatgttagcagta

SEQ ID NO: 944 - DNA, 80 bp, Artificial Sequence
  Description of Artificial Sequence: Synthetic oligonucleotide
  Description of Combined DNA/RNA Molecule: Synthetic oligonucleotide
ccaaggtaaugttagcagtaacgauaacggtacaaggctaaagcuutgctaacggucgagcatactagugccaagtgtgg

SEQ ID NO: 945 - DNA, 20 bp, Artificial Sequence
  Description of Artificial Sequence: Synthetic primer
actttgaatgcttcttctga

SEQ ID NO: 946 - DNA, 20 bp, Artificial Sequence
  Description of Artificial Sequence: Synthetic primer
ctcctgaggttggtcatcag

SEQ ID NO: 947 - DNA, 184 bp, Artificial Sequence
  Description of Artificial Sequence: Synthetic polynucleotide
ctcctgaggttggtcatcagcttgttcaaattctcctgtaaaaccaggaaaaatcctgtcattttaggctctagacatggatatgagcagtcattggtgtctataaaatcaatatctatagctgagttgaatgaccagtatggactgcattcatataaggcaacactttgaatgcttcttctga

SEQ ID NO: 948 - DNA, 80 bp, Artificial Sequence
  Description of Artificial Sequence: Synthetic oligonucleotide
  Description of Combined DNA/RNA Molecule: Synthetic oligonucleotide
actttgaaugcttcttctgaacgauaacggtacaaggctaaagcuutgctaacggucgagctcctgaggutggtcatcag

SEQ ID NO: 949 - DNA, 20 bp, Artificial Sequence
  Description of Artificial Sequence: Synthetic primer
atgagcttagccaacatggc

SEQ ID NO: 950 - DNA, 20 bp, Artificial Sequence
  Description of Artificial Sequence: Synthetic primer
ctctagcactgacacgttta

SEQ ID NO: 951 - DNA, 184 bp, Artificial Sequence
  Description of Artificial Sequence: Synthetic polynucleotide
gccatgttggctaagctcatctagaactcatgcctcaagtgatccacctgcctcagcctcccaaagtgctgggattacaggcatgagccactgcccccagcctatatccttgacttttaaaagaggctgctctaaatgactcaccctcacctgtttcaagtgggtaaacgtgtcagtgctagag

SEQ ID NO: 952 - DNA, 80 bp, Artificial Sequence
  Description of Artificial Sequence: Synthetic oligonucleotide
  Description of Combined DNA/RNA Molecule: Synthetic oligonucleotide
atgagctuagccaacatggcacgauaacggtacaaggctaaagcuutgctaacggucgagctctagcacugacacgttta

SEQ ID NO: 953 - DNA, 20 bp, Artificial Sequence
  Description of Artificial Sequence: Synthetic primer
tgtgagaaggctgtctgagg

SEQ ID NO: 954 - DNA, 20 bp, Artificial Sequence
  Description of Artificial Sequence: Synthetic primer
catcttggggacccaaaaac

SEQ ID NO: 955 - DNA, 184 bp, Artificial Sequence
  Description of Artificial Sequence: Synthetic polynucleotide
cctcagacagccttctcacaatgtgctgagtcctgacttatatcctctgcagaacaggagatactgaccatactgcctctccacctctcagtgctccagctgacgaaagccctggctctcacccattcccgaacaccatgggatacaaaccattaatccctgttgtttttgggtccccaagatg

SEQ ID NO: 956 - DNA, 80 bp, Artificial Sequence
  Description of Artificial Sequence: Synthetic oligonucleotide
  Description of Combined DNA/RNA Molecule: Synthetic oligonucleotide
tgtgagaaggcugtctgaggacgauaacggtacaaggctaaagcuutgctaacggucgagcatctuggggacccaaaaac

SEQ ID NO: 957 - DNA, 20 bp, Artificial Sequence
  Description of Artificial Sequence: Synthetic primer
tctttcaaagcaaaacaaaa

SEQ ID NO: 958 - DNA, 20 bp, Artificial Sequence
  Description of Artificial Sequence: Synthetic primer
caagccaacattgtttttgt

SEQ ID NO: 959 - DNA, 185 bp, Artificial Sequence
  Description of Artificial Sequence: Synthetic polynucleotide
caagccaacattgtttttgttgctgtatgtagtcggtgctgtgacttgtttgtgctcatctctgttctgtaggcaacttgccactccctactgaataaagctacagtaaaagaaaaaaaggaaaacaaaaaatcagtaagtttggagaactttttattagctgtttctttcaaagcaaaacaaaa

SEQ ID NO: 960 - DNA, 80 bp, Artificial Sequence
  Description of Artificial Sequence: Synthetic oligonucleotide
  Description of Combined DNA/RNA Molecule: Synthetic oligonucleotide
tcttucaaagcaaaacaaaaacgauaacggtacaaggctaaagcuutgctaacggucgagcaagccaacautgtttttgt

SEQ ID NO: 961 - DNA, 20 bp, Artificial Sequence
  Description of Artificial Sequence: Synthetic primer
tgaaaaggaacctacacagt

SEQ ID NO: 962 - DNA, 20 bp, Artificial Sequence
  Description of Artificial Sequence: Synthetic primer
ccaaggtttgtcatcatcaa

SEQ ID NO: 963 - DNA, 185 bp, Artificial Sequence
  Description of Artificial Sequence: Synthetic polynucleotide
actgtgtaggttccttttcagtggacacatgaataactccactaactcgctctactaacatgagtaactctttttatctttgccagaatcttgattgaaaggggcataaatgttttctctgttactatttcctccttgcactttgactaggttttgcagccactcttgatgatgacaaaccttgg

SEQ ID NO: 964 - DNA, 80 bp, Artificial Sequence
  Description of Artificial Sequence: Synthetic oligonucleotide
  Description of Combined DNA/RNA Molecule: Synthetic oligonucleotide
tgaaaaggaaccuacacagtacgauaacggtacaaggctaaagcuutgctaacggucgagccaaggttugtcatcatcaa

SEQ ID NO: 965 - DNA, 20 bp, Artificial Sequence
  Description of Artificial Sequence: Synthetic primer
ctccctacatttccacagta

SEQ ID NO: 966 - DNA, 20 bp, Artificial Sequence
  Description of Artificial Sequence: Synthetic primer
ctataccatcatctctgcaa

SEQ ID NO: 967 - DNA, 185 bp, Artificial Sequence
  Description of Artificial Sequence: Synthetic polynucleotide
ctataccatcatctctgcaaggtaactgctcggaaatagagcctgaggaatcttttctgatcacagatcttttggttttcccttgcccagttcgacttctttgccgcaccataaatccaccaatacctatccaaaaaagaaattaggtaaactgataagtaatttctccctacatttccacagta

SEQ ID NO: 968 - DNA, 80 bp, Artificial Sequence
  Description of Artificial Sequence: Synthetic oligonucleotide
  Description of Combined DNA/RNA Molecule: Synthetic oligonucleotide
ctccctacauttccacagtaacgauaacggtacaaggctaaagcuutgctaacggucgagctataccaucatctctgcaa

SEQ ID NO: 969 - DNA, 20 bp, Artificial Sequence
  Description of Artificial Sequence: Synthetic primer
tccagccaacaccttgattt

SEQ ID NO: 970 - DNA, 20 bp, Artificial Sequence
  Description of Artificial Sequence: Synthetic primer
cttgtcactggaggtggcag

SEQ ID NO: 971 - DNA, 185 bp, Artificial Sequence
  Description of Artificial Sequence: Synthetic polynucleotide
cttgtcactggaggtggcagatggaatcctgttaacctaaaacaaaatggaattaattgttagagacataatcattttatctaagagtttttaagaaggattaaagtcatatttaaaaaaaataataaaacagattttctcctataatttccagaaggaatgctatccagccaacaccttgattt

SEQ ID NO: 972 - DNA, 80 bp, Artificial Sequence
  Description of Artificial Sequence: Synthetic oligonucleotide
  Description of Combined DNA/RNA Molecule: Synthetic oligonucleotide
tccagccaacaccutgatttacgauaacggtacaaggctaaagcuutgctaacggucgagcttgtcacuggaggtggcag

SEQ ID NO: 973 - DNA, 20 bp, Artificial Sequence
  Description of Artificial Sequence: Synthetic primer
gaaggattccattaacttga

SEQ ID NO: 974 - DNA, 20 bp, Artificial Sequence
  Description of Artificial Sequence: Synthetic primer
caaccttcaactatttcttc

SEQ ID NO: 975 - DNA, 185 bp, Artificial Sequence
  Description of Artificial Sequence: Synthetic polynucleotide
tcaagttaatggaatccttcttccttcctgaactaattgcaagttacggggaacttcgggtatataatgtaaataattacagtctaataattgttcctcaaactttacagaggagaatgccctgtttgttaaccatgtttcttttggcaggagggggtccgcatggaagaaatagttgaaggttg

SEQ ID NO: 976 - DNA, 80 bp, Artificial Sequence
  Description of Artificial Sequence: Synthetic oligonucleotide
  Description of Combined DNA/RNA Molecule: Synthetic oligonucleotide
gaaggatuccattaacttgaacgauaacggtacaaggctaaagcuutgctaacggucgagcaaccttcaacuatttcttc

SEQ ID NO: 977 - DNA, 20 bp, Artificial Sequence
  Description of Artificial Sequence: Synthetic primer
gagcccagggccaggaggta

SEQ ID NO: 978 - DNA, 20 bp, Artificial Sequence
  Description of Artificial Sequence: Synthetic primer
cctactccctctccgtgagc

SEQ ID NO: 979 - DNA, 185 bp, Artificial Sequence
  Description of Artificial Sequence: Synthetic polynucleotide
cctactccctctccgtgagcaggagggctcgccgatttgcccaggtgagcccatacctattgcctgtctggggaagattgaaaggccaagggacatgggggcacagggaggcaggtgacactgcctcttggcccaaccagcacagagtagactgggtggagtcctgagcccagggccaggaggta

SEQ ID NO: 980 - DNA, 80 bp, Artificial Sequence
  Description of Artificial Sequence: Synthetic oligonucleotide
  Description of Combined DNA/RNA Molecule: Synthetic oligonucleotide
gagcccagggccaggagguaacgauaacggtacaaggctaaagcuutgctaacggucgagcctactcccuctccgtgagc

SEQ ID NO: 981 - DNA, 20 bp, Artificial Sequence
  Description of Artificial Sequence: Synthetic primer
atgtcatgcaacaatgataa

SEQ ID NO: 982 - DNA, 20 bp, Artificial Sequence
  Description of Artificial Sequence: Synthetic primer
caagtttgggttggtctaga

SEQ ID NO: 983 - DNA, 185 bp, Artificial Sequence
  Description of Artificial Sequence: Synthetic polynucleotide
ttatcattgttgcatgacattccatttggcagttgggcttatttttagccagactatcaaagtatttttcaactggactgtcactgcacttgaacttggaatcttataacttgaagaactgccctggagaaaggaagaaacttataataaatgggaaattataaatctagaccaacccaaacttg

SEQ ID NO: 984 - DNA, 80 bp, Artificial Sequence
  Description of Artificial Sequence: Synthetic oligonucleotide
  Description of Combined DNA/RNA Molecule: Synthetic oligonucleotide
atgtcaugcaacaatgataaacgauaacggtacaaggctaaagcuutgctaacggucgagcaagtttgggutggtctaga

SEQ ID NO: 985 - DNA, 20 bp, Artificial Sequence
  Description of Artificial Sequence: Synthetic primer
agaaataagatgttataatt

SEQ ID NO: 986 - DNA, 20 bp, Artificial Sequence
  Description of Artificial Sequence: Synthetic primer
caagttaaggcacacagaag

SEQ ID NO: 987 - DNA, 186 bp, Artificial Sequence
  Description of Artificial Sequence: Synthetic polynucleotide
aattataacatcttatttctaactgatcataaaatttaaaaatagttgatcatactttgtaacagaatcacaaattgtatgttatgaaaaaattttggaactataaggaaaaatacgttttaaaacaacttcatttgtgttttctcctaggtcagctgcctataatcttctgtgtgccttaacttg

SEQ ID NO: 988 - DNA, 80 bp, Artificial Sequence
  Description of Artificial Sequence: Synthetic oligonucleotide
  Description of Combined DNA/RNA Molecule: Synthetic oligonucleotide
agaaataagaugttataattacgauaacggtacaaggctaaagcuutgctaacggucgagcaagtuaaggcacacagaag

SEQ ID NO: 989 - DNA, 20 bp, Artificial Sequence
  Description of Artificial Sequence: Synthetic primer
gcgcagacactgattgctaa

SEQ ID NO: 990 - DNA, 20 bp, Artificial Sequence
  Description of Artificial Sequence: Synthetic primer
cctgcacaactgcaggatag

SEQ ID NO: 991 - DNA, 186 bp, Artificial Sequence
  Description of Artificial Sequence: Synthetic polynucleotide
cctgcacaactgcaggatagcacacctggacctaaaggttggtgaggccccgggcaggtgaaggggggtctgagcacaccggcttggccatgcgggacacagagccccctctgaagccaggccaggagcccccaagtgactagggacaaaaagggtgggtggggcagcgcagacactgattgctaa

SEQ ID NO: 992 - DNA, 80 bp, Artificial Sequence
  Description of Artificial Sequence: Synthetic oligonucleotide
  Description of Combined DNA/RNA Molecule: Synthetic oligonucleotide
gcgcagacacugattgctaaacgauaacggtacaaggctaaagcuutgctaacggucgagcctgcacaacugcaggatag

SEQ ID NO: 993 - DNA, 20 bp, Artificial Sequence
  Description of Artificial Sequence: Synthetic primer
tacgtttttaaattttctaa

SEQ ID NO: 994 - DNA, 20 bp, Artificial Sequence
  Description of Artificial Sequence: Synthetic primer
cttggagttggagaaatgaa

SEQ ID NO: 995 - DNA, 186 bp, Artificial Sequence
  Description of Artificial Sequence: Synthetic polynucleotide
ttagaaaatttaaaaacgtaacgagaataaatgaccatattagtaatgtcatccaattattgatctaatgtgtttatgaaaggaactgattcaaacaattcgataaccaaacatagcttatgaaataagtttagcagagtgtatacttactttggcaatatggtctttcatttctccaactccaag

SEQ ID NO: 996 - DNA, 80 bp, Artificial Sequence
  Description of Artificial Sequence: Synthetic oligonucleotide
  Description of Combined DNA/RNA Molecule: Synthetic oligonucleotide
tacgttttuaaattttctaaacgauaacggtacaaggctaaagcuutgctaacggucgagcttggagtuggagaaatgaa

SEQ ID NO: 997 - DNA, 20 bp, Artificial Sequence
  Description of Artificial Sequence: Synthetic primer
tattctaatgtcacttatca

SEQ ID NO: 998 - DNA, 20 bp, Artificial Sequence
  Description of Artificial Sequence: Synthetic primer
ccacttggtccttgaagatt

SEQ ID NO: 999 - DNA, 186 bp, Artificial Sequence
  Description of Artificial Sequence: Synthetic polynucleotide
ccacttggtccttgaagattagagccacacgttttcactaaaagagaaattgcattttaaaagatgaacatatgtcacatgtaaaattacaacaataaaatatcttgcaaatagactttacattcaaaatgacacaattataaccacattgaaatatatattatggtattctaatgtcacttatca

SEQ ID NO: 1000 - DNA, 80 bp, Artificial Sequence
  Description of Artificial Sequence: Synthetic oligonucleotide
  Description of Combined DNA/RNA Molecule: Synthetic oligonucleotide
tattctaaugtcacttatcaacgauaacggtacaaggctaaagcuutgctaacggucgagccacttgguccttgaagatt

SEQ ID NO: 1001 - DNA, 20 bp, Artificial Sequence
  Description of Artificial Sequence: Synthetic primer
gttttgtgttccaggtttcc

SEQ ID NO: 1002 - DNA, 20 bp, Artificial Sequence
  Description of Artificial Sequence: Synthetic primer
caggactctctccaggccag

SEQ ID NO: 1003 - DNA, 186 bp, Artificial Sequence
  Description of Artificial Sequence: Synthetic polynucleotide
ggaaacctggaacacaaaaccattaatataattggcacagaaaccacgagtttggtttgaacatcaaagggagttttgccaaggccttactgtctgcacttgaagttttggttcttcagtgcagaacaaatgatctgttttcatttttaggcatgtcagacccgaactggcctggagagagtcctg

SEQ ID NO: 1004 - DNA, 80 bp, Artificial Sequence
  Description of Artificial Sequence: Synthetic oligonucleotide
  Description of Combined DNA/RNA Molecule: Synthetic oligonucleotide
gttttgtgtuccaggtttccacgauaacggtacaaggctaaagcuutgctaacggucgagcaggactcuctccaggccag

SEQ ID NO: 1005 - DNA, 20 bp, Artificial Sequence
  Description of Artificial Sequence: Synthetic primer
tcttgccgcacgtatttacc

SEQ ID NO: 1006 - DNA, 20 bp, Artificial Sequence
  Description of Artificial Sequence: Synthetic primer
cctgcggctgcctcagctgg

SEQ ID NO: 1007 - DNA, 186 bp, Artificial Sequence
  Description of Artificial Sequence: Synthetic polynucleotide
cctgcggctgcctcagctggtggacatggctgctcaggtgagtcagcccctcccgcctccccacacccttggtcctcaagcacccagacccatctggtgcagccagttctggcctcttgagtgccccctccaagaagcctgccttgattgcctccacactcactgatcttgccgcacgtatttacc

SEQ ID NO: 1008 - DNA, 80 bp, Artificial Sequence
  Description of Artificial Sequence: Synthetic oligonucleotide
  Description of Combined DNA/RNA Molecule: Synthetic oligonucleotide
tcttgccgcacguatttaccacgauaacggtacaaggctaaagcuutgctaacggucgagcctgcggcugcctcagctgg

SEQ ID NO: 1009 - DNA, 20 bp, Artificial Sequence
  Description of Artificial Sequence: Synthetic primer
attgttttgctctattcccc

SEQ ID NO: 1010 - DNA, 20 bp, Artificial Sequence
  Description of Artificial Sequence: Synthetic primer
cttacgagtatcctggactt

SEQ ID NO: 1011 - DNA, 186 bp, Artificial Sequence
  Description of Artificial Sequence: Synthetic polynucleotide
ggggaatagagcaaaacaataaattccagaaaaataaatactacctctgggtggttgagaactttaatttgtaatgatttgactgtatccatactcaccctccaataacctagactgactgtttcttttgtttttctttcatttcttcaggcccccctcccactgcaagtccaggatactcgtaag

SEQ ID NO: 1012 - DNA, 80 bp, Artificial Sequence
  Description of Artificial Sequence: Synthetic oligonucleotide
  Description of Combined DNA/RNA Molecule: Synthetic oligonucleotide
attgttttgcuctattccccacgauaacggtacaaggctaaagcuutgctaacggucgagcttacgaguatcctggactt

SEQ ID NO: 1013 - DNA, 20 bp, Artificial Sequence
  Description of Artificial Sequence: Synthetic primer
tcacaaggtcaggagtttga

SEQ ID NO: 1014 - DNA, 20 bp, Artificial Sequence
  Description of Artificial Sequence: Synthetic primer
ctcttctccaggaagctcct

SEQ ID NO: 1015 - DNA, 186 bp, Artificial Sequence
  Description of Artificial Sequence: Synthetic polynucleotide
tcaaactcctgaccttgtgatctgcctgcttcagcctcccaaagtgctgggattacaggtgtgagccactgcacccggcctatgtttatatactttttaaagtaaatgatttgtggataaacctgatttttttccctcctaccatcttagtatctaatgcttttaaaggagcttcctggagaagag

SEQ ID NO: 1016 - DNA, 80 bp, Artificial Sequence
  Description of Artificial Sequence: Synthetic oligonucleotide
  Description of Combined DNA/RNA Molecule: Synthetic oligonucleotide
tcacaaggucaggagtttgaacgauaacggtacaaggctaaagcuutgctaacggucgagctcttcuccaggaagctcct

SEQ ID NO: 1017 - DNA, 20 bp, Artificial Sequence
  Description of Artificial Sequence: Synthetic primer
aggtggaaaaacggggcaat

SEQ ID NO: 1018 - DNA, 20 bp, Artificial Sequence
  Description of Artificial Sequence: Synthetic primer
ctccggtcatccagggcgtg

SEQ ID NO: 1019 - DNA, 186 bp, Artificial Sequence
  Description of Artificial Sequence: Synthetic polynucleotide
attgccccgtttttccacctctttctcttctttgtatctcttggtctgtctgcttttcaggccatgggtgggattagaggataggatgggaggatggtggcagcagggaaaccggagccaactttctctcctcctctcttccccttgaagacacctcaacacagagcacgccctggatgaccggag

SEQ ID NO: 1020 - DNA, 80 bp, Artificial Sequence
  Description of Artificial Sequence: Synthetic oligonucleotide
  Description of Combined DNA/RNA Molecule: Synthetic oligonucleotide
agguggaaaaacggggcaatacgauaacggtacaaggctaaagcuutgctaacggucgagctccggtcauccagggcgtg

SEQ ID NO: 1021 - DNA, 20 bp, Artificial Sequence
  Description of Artificial Sequence: Synthetic primer
atattcagcaagtttgtttg

SEQ ID NO: 1022 - DNA, 20 bp, Artificial Sequence
  Description of Artificial Sequence: Synthetic primer
caacatggaagtctcacaaa

SEQ ID NO: 1023 - DNA, 186 bp, Artificial Sequence
  Description of Artificial Sequence: Synthetic polynucleotide
caaacaaacttgctgaatatgtaataaccaaatctggaaggaaaaaaacagaggatgcaattgccacttttaatgtggaccacaagtcaagtaaggtatgttacagaattctaagagaacagctacaatttatccataagtgttttaagcaatcaaattataagattttgtgagacttccatgttg

SEQ ID NO: 1024 - DNA, 80 bp, Artificial Sequence
  Description of Artificial Sequence: Synthetic oligonucleotide
  Description of Combined DNA/RNA Molecule: Synthetic oligonucleotide
atattcagcaaguttgtttgacgauaacggtacaaggctaaagcuutgctaacggucgagcaacatggaaguctcacaaa

SEQ ID NO: 1025 - DNA, 20 bp, Artificial Sequence
  Description of Artificial Sequence: Synthetic primer
ccctcccctatatcacatcc

SEQ ID NO: 1026 - DNA, 20 bp, Artificial Sequence
  Description of Artificial Sequence: Synthetic primer
caggctgccatctgctgggt

SEQ ID NO: 1027 - DNA, 186 bp, Artificial Sequence
  Description of Artificial Sequence: Synthetic polynucleotide
caggctgccatctgctgggtcagagagaaaggccattctgtggagcagagagaaacaaggagaccaatgggttcttgccccctggtttcatgaaggccccaaattccttccaatttctcagctactaggagcctgttcttgtaggaaacatcatggggctccaagaccctcccctatatcacatcc

SEQ ID NO: 1028 - DNA, 80 bp, Artificial Sequence
  Description of Artificial Sequence: Synthetic oligonucleotide
  Description of Combined DNA/RNA Molecule: Synthetic oligonucleotide
ccctccccuatatcacatccacgauaacggtacaaggctaaagcuutgctaacggucgagcaggctgccauctgctgggt

SEQ ID NO: 1029 - DNA, 20 bp, Artificial Sequence
  Description of Artificial Sequence: Synthetic primer
tttttggtaagaaatacaaa

SEQ ID NO: 1030 - DNA, 20 bp, Artificial Sequence
  Description of Artificial Sequence: Synthetic primer
caatgattcatggtaactgg

SEQ ID NO: 1031 - DNA, 187 bp, Artificial Sequence
  Description of Artificial Sequence: Synthetic polynucleotide
tttgtatttcttaccaaaaattctagaaatgcattttttagaatggagaaatgttaatttaaaaattttgtcctttggtgaagctatttatacatgtatatcttagggttctgtttttaagtatatttttttctttgacttatctcacagcaaagaagtagaaggaaccagttaccatgaatcattg

SEQ ID NO: 1032 - DNA, 80 bp, Artificial Sequence
  Description of Artificial Sequence: Synthetic oligonucleotide
  Description of Combined DNA/RNA Molecule: Synthetic oligonucleotide
tttttgguaagaaatacaaaacgauaacggtacaaggctaaagcuutgctaacggucgagcaatgattcauggtaactgg

SEQ ID NO: 1033 - DNA, 20 bp, Artificial Sequence
  Description of Artificial Sequence: Synthetic primer
ctggccaacatggtgaaacc

SEQ ID NO: 1034 - DNA, 20 bp, Artificial Sequence
  Description of Artificial Sequence: Synthetic primer
ccttcagtttgtggcagctc

SEQ ID NO: 1035 - DNA, 187 bp, Artificial Sequence
  Description of Artificial Sequence: Synthetic polynucleotide
ccttcagtttgtggcagctctcacagatgtgaatacacgtgagttgatcctttttatcattaagaaatgcataaataaggccggatgcggtggctcacgtctgtaatcccagcactttgggaggccgaggcgggtggatcacctgatgtcaggagtttgggactagcctggccaacatggtgaaacc

SEQ ID NO: 1036 - DNA, 80 bp, Artificial Sequence
  Description of Artificial Sequence: Synthetic oligonucleotide
  Description of Combined DNA/RNA Molecule: Synthetic oligonucleotide
ctggccaacauggtgaaaccacgauaacggtacaaggctaaagcuutgctaacggucgagccttcagttugtggcagctc

SEQ ID NO: 1037 - DNA, 20 bp, Artificial Sequence
  Description of Artificial Sequence: Synthetic primer
aaagctacacccagggagat

SEQ ID NO: 1038 - DNA, 20 bp, Artificial Sequence
  Description of Artificial Sequence: Synthetic primer
ccaagcagtaattctctcct

SEQ ID NO: 1039 - DNA, 187 bp, Artificial Sequence
  Description of Artificial Sequence: Synthetic polynucleotide
atctccctgggtgtagctttttaaaaatagctttactgttttgtaaaaatgatgcataattataaaagtggcaaacaataccaaatttacttcatgtgtaggttttttattttgctctattttttggtaggtaataaatctgtatcagatgactccggaaatgtgggaggagagaattactgcttgg

SEQ ID NO: 1040 - DNA, 80 bp, Artificial Sequence
  Description of Artificial Sequence: Synthetic oligonucleotide
  Description of Combined DNA/RNA Molecule: Synthetic oligonucleotide
aaagcuacacccagggagatacgauaacggtacaaggctaaagcuutgctaacggucgagccaagcaguaattctctcct

SEQ ID NO: 1041 - DNA, 20 bp, Artificial Sequence
  Description of Artificial Sequence: Synthetic primer
caggcccaatgcaggactct

SEQ ID NO: 1042 - DNA, 20 bp, Artificial Sequence
  Description of Artificial Sequence: Synthetic primer
ctccaggaagtcctccagga

SEQ ID NO: 1043 - DNA, 188 bp, Artificial Sequence
  Description of Artificial Sequence: Synthetic polynucleotide
ctccaggaagtcctccaggaggtccagcatcttggtcatctgcaggggagacgggcacgtgaggaactgccaaggagcaaggggccccatgggccatgggcggggaccccgccacaggcaggggaggagagagctgcctgctaggtggggagacagctgggacccaggcaggcccaatgcaggactct

SEQ ID NO: 1044 - DNA, 80 bp, Artificial Sequence
  Description of Artificial Sequence: Synthetic oligonucleotide
  Description of Combined DNA/RNA Molecule: Synthetic oligonucleotide
caggcccaaugcaggactctacgauaacggtacaaggctaaagcuutgctaacggucgagctccaggaagucctccagga

SEQ ID NO: 1045 - DNA, 20 bp, Artificial Sequence
  Description of Artificial Sequence: Synthetic primer
gttcatagcacttttatatc

SEQ ID NO: 1046 - DNA, 20 bp, Artificial Sequence
  Description of Artificial Sequence: Synthetic primer
cttggagcatgactgcacat

SEQ ID NO: 1047 - DNA, 188 bp, Artificial Sequence
  Description of Artificial Sequence: Synthetic polynucleotide
cttggagcatgactgcacatgccaccacgtatgaagcaggtatgtgaggaaatgtctactttggacccttgataatggtgtttcccaggttctgtggaaattagaacatgtgttccctatggtgtctcaattataccttatcctatataaaatagttcatcctctatagttcatagcacttttatatc

SEQ ID NO: 1048 - DNA, 80 bp, Artificial Sequence
  Description of Artificial Sequence: Synthetic oligonucleotide
  Description of Combined DNA/RNA Molecule: Synthetic oligonucleotide
gttcatagcacutttatatcacgauaacggtacaaggctaaagcuutgctaacggucgagcttggagcaugactgcacat

SEQ ID NO: 1049 - DNA, 20 bp, Artificial Sequence
  Description of Artificial Sequence: Synthetic primer
tctgaataaagtctcactca

SEQ ID NO: 1050 - DNA, 20 bp, Artificial Sequence
  Description of Artificial Sequence: Synthetic primer
cttgcctgtctcccccttga

SEQ ID NO: 1051 - DNA, 188 bp, Artificial Sequence
  Description of Artificial Sequence: Synthetic polynucleotide
tgagtgagactttattcagagatgagtttacgtaaaatctgctgtgctggttaaagcaaggccagccacctgggaggatgggttttgggaatcactgcatcctggcagagggacagggcaggagctggagctgggtctctctctgcccagggagtttgctggactttctcaagggggagacaggcaag

SEQ ID NO: 1052 - DNA, 80 bp, Artificial Sequence
  Description of Artificial Sequence: Synthetic oligonucleotide
  Description of Combined DNA/RNA Molecule: Synthetic oligonucleotide
tctgaataaaguctcactcaacgauaacggtacaaggctaaagcuutgctaacggucgagcttgcctguctcccccttga

SEQ ID NO: 1053 - DNA, 20 bp, Artificial Sequence
  Description of Artificial Sequence: Synthetic primer
gtttgcatgtaagatgagat

SEQ ID NO: 1054 - DNA, 20 bp, Artificial Sequence
  Description of Artificial Sequence: Synthetic primer
caggctttaagtgaattcaa

SEQ ID NO: 1055 - DNA, 188 bp, Artificial Sequence
  Description of Artificial Sequence: Synthetic polynucleotide
caggctttaagtgaattcaaagcaatggattccttctaggacgataggttttaacaagaaagctttttctttcttttctttctttctttttctttttaattccatttttgtatgcatacctgccagctcgtatgcctctggcatggggaaattaagggaacagtgtctgtttgcatgtaagatgagat

SEQ ID NO: 1056 - DNA, 80 bp, Artificial Sequence
  Description of Artificial Sequence: Synthetic oligonucleotide
  Description of Combined DNA/RNA Molecule: Synthetic oligonucleotide
gtttgcatguaagatgagatacgauaacggtacaaggctaaagcuutgctaacggucgagcaggcttuaagtgaattcaa

SEQ ID NO: 1057 - DNA, 20 bp, Artificial Sequence
  Description of Artificial Sequence: Synthetic primer
gaacctgtcaaaacagggta

SEQ ID NO: 1058 - DNA, 20 bp, Artificial Sequence
  Description of Artificial Sequence: Synthetic primer
ctactctctagcaggggact

SEQ ID NO: 1059 - DNA, 188 bp, Artificial Sequence
  Description of Artificial Sequence: Synthetic polynucleotide
ctactctctagcaggggacttactctaaagcatgagtttgctgggaaacagaaaagcgtgcattctagagggactcattacaggcagtgttacctgaggaatggcctgtggtccaaggttctgtccttcactgttctgtgttccagttaccacctggcccataaaagggaacctgtcaaaacagggta

SEQ ID NO: 1060 - DNA, 80 bp, Artificial Sequence
  Description of Artificial Sequence: Synthetic oligonucleotide
  Description of Combined DNA/RNA Molecule: Synthetic oligonucleotide
gaacctgucaaaacagggtaacgauaacggtacaaggctaaagcuutgctaacggucgagctactctcuagcaggggact

SEQ ID NO: 1061 - DNA, 20 bp, Artificial Sequence
  Description of Artificial Sequence: Synthetic primer
cttttcctttttttatagag

SEQ ID NO: 1062 - DNA, 20 bp, Artificial Sequence
  Description of Artificial Sequence: Synthetic primer
catggagaagggcaacctga

SEQ ID NO: 1063 - DNA, 189 bp, Artificial Sequence
  Description of Artificial Sequence: Synthetic polynucleotide
catggagaagggcaacctgatgcacgtgctgaaagccgaggtagagagggcccctccgcacggggatccccagcgcttgggccctggctgtctgttatggctccccttggggtgtttgtttgcagctcgttagcatcaaatttgcaaattgcttggtagtttgaattttcttttcctttttttatagag

SEQ ID NO: 1064 - DNA, 80 bp, Artificial Sequence
  Description of Artificial Sequence: Synthetic oligonucleotide
  Description of Combined DNA/RNA Molecule: Synthetic oligonucleotide
cttttccttuttttatagagacgauaacggtacaaggctaaagcuutgctaacggucgagcatggagaagggcaaccuga

SEQ ID NO: 1065 - DNA, 20 bp, Artificial Sequence
  Description of Artificial Sequence: Synthetic primer
tacactaactttttagttct

SEQ ID NO: 1066 - DNA, 20 bp, Artificial Sequence
  Description of Artificial Sequence: Synthetic primer
ccctctgagctcgagtcatt

SEQ ID NO: 1067 - DNA, 189 bp, Artificial Sequence
  Description of Artificial Sequence: Synthetic polynucleotide
agaactaaaaagttagtgtataatagtttaaataaaatgttgtggtgaagaaaagagagtaatagcaatgtcacttttaccatttaggatagcaaatacttaggtaaatgctgaactgtggatagtgagtgttgaattaaccttttccagatattgatggacagtatgcaatgactcgagctcagaggg

SEQ ID NO: 1068 - DNA, 80 bp, Artificial Sequence
  Description of Artificial Sequence: Synthetic oligonucleotide
  Description of Combined DNA/RNA Molecule: Synthetic oligonucleotide
tacactaacuttttagttctacgauaacggtacaaggctaaagcuutgctaacggucgagccctctgagcucgagtcatt

SEQ ID NO: 1069 - DNA, 20 bp, Artificial Sequence
  Description of Artificial Sequence: Synthetic primer
gtggggcctatggaggcaag

SEQ ID NO: 1070 - DNA, 20 bp, Artificial Sequence
  Description of Artificial Sequence: Synthetic primer
ctaccgcgtgcgcgaggatg

SEQ ID NO: 1071 - DNA, 189 bp, Artificial Sequence
  Description of Artificial Sequence: Synthetic polynucleotide
cttgcctccataggccccacccccgcaccgctaggccccgccgcgcttcactgggatcatgccctatcatgatacccagcatccgtctactccaccctgcctgttccaagtgaccccagcaccccctcagactgcaccccgcctggtcaccagaacacggggctgtccccatcctcgcgcacgcggtag

SEQ ID NO: 1072 - DNA, 80 bp, Artificial Sequence
  Description of Artificial Sequence: Synthetic oligonucleotide
  Description of Combined DNA/RNA Molecule: Synthetic oligonucleotide
gtggggccuatggaggcaagacgauaacggtacaaggctaaagcuutgctaacggucgagctaccgcgugcgcgaggatg

SEQ ID NO: 1073 - DNA, 20 bp, Artificial Sequence
  Description of Artificial Sequence: Synthetic primer
cttcccgggtgatcactttt

SEQ ID NO: 1074 - DNA, 20 bp, Artificial Sequence
  Description of Artificial Sequence: Synthetic primer
cttattgattttttcatccg

SEQ ID NO: 1075 - DNA, 189 bp, Artificial Sequence
  Description of Artificial Sequence: Synthetic polynucleotide
aaaagtgatcacccgggaagatgaggttggggttctagaacatgtgttcacctcaaagcagtccccaaagtcaatgtgcaggatcttcccactcagacggtccagcatcaggttggatgggtgtctttgagaaacagaagacagatcagggagggatcaacagagataacggatgaaaaaatcaataag

SEQ ID NO: 1076 - DNA, 80 bp, Artificial Sequence
  Description of Artificial Sequence: Synthetic oligonucleotide
  Description of Combined DNA/RNA Molecule: Synthetic oligonucleotide
cttcccgggugatcacttttacgauaacggtacaaggctaaagcuutgctaacggucgagcttattgatuttttcatccg

SEQ ID NO: 1077 - DNA, 20 bp, Artificial Sequence
  Description of Artificial Sequence: Synthetic primer
ttcagagctgaaatgtagcc

SEQ ID NO: 1078 - DNA, 20 bp, Artificial Sequence
  Description of Artificial Sequence: Synthetic primer
catcatctactctatacctc

SEQ ID NO: 1079 - DNA, 189 bp, Artificial Sequence
  Description of Artificial Sequence: Synthetic polynucleotide
catcatctactctatacctcacacgacttgcaggtaatccctaaaataaaattattaattattaatttgctgttaccaagttaaaacacagtgcaatgataatattaaatggatctttaaaattcatggtcttttagaagtgaaaatcatatttccatattttcattctttcagagctgaaatgtagcc

SEQ ID NO: 1080 - DNA, 80 bp, Artificial Sequence
  Description of Artificial Sequence: Synthetic oligonucleotide
  Description of Combined DNA/RNA Molecule: Synthetic oligonucleotide
ttcagagcugaaatgtagccacgauaacggtacaaggctaaagcuutgctaacggucgagcatcatctacuctatacctc

SEQ ID NO: 1081 - DNA, 20 bp, Artificial Sequence
  Description of Artificial Sequence: Synthetic primer
ctttttgaatcttcaggaca

SEQ ID NO: 1082 - DNA, 20 bp, Artificial Sequence
  Description of Artificial Sequence: Synthetic primer
ctttgaatccctattgtgta

SEQ ID NO: 1083 - DNA, 189 bp, Artificial Sequence
  Description of Artificial Sequence: Synthetic polynucleotide
ctttgaatccctattgtgtattgtgggatgactccaaaacgtaagtgacagatgttttcctacattactttgggctaaattttcaaagcacattaagttagttcagctgcctgctagttaacaggaatataagtcagtgggatgttgcattcagagaaaaaaaaatcctctttttgaatcttcaggaca

SEQ ID NO: 1084 - DNA, 80 bp, Artificial Sequence
  Description of Artificial Sequence: Synthetic oligonucleotide
  Description of Combined DNA/RNA Molecule: Synthetic oligonucleotide
ctttttgaaucttcaggacaacgauaacggtacaaggctaaagcuutgctaacggucgagctttgaauccctattgtgta

SEQ ID NO: 1085 - DNA, 20 bp, Artificial Sequence
  Description of Artificial Sequence: Synthetic primer
aagcatgtagacactcaccc

SEQ ID NO: 1086 - DNA, 20 bp, Artificial Sequence
  Description of Artificial Sequence: Synthetic primer
cccatctattcaagcaaaaa

SEQ ID NO: 1087 - DNA, 189 bp, Artificial Sequence
  Description of Artificial Sequence: Synthetic polynucleotide
cccatctattcaagcaaaaatatggggaagccttgggcaggtattgagtttgctcaaatatttatctagtatctcctttgtgcacatatttatctggtgccacattgggcaaagcactgcgctagacactagggatagagttgtaaaaaacacagtttcctccttcagaaagcatgtagacactcaccc

SEQ ID NO: 1088 - DNA, 80 bp, Artificial Sequence
  Description of Artificial Sequence: Synthetic oligonucleotide
  Description of Combined DNA/RNA Molecule: Synthetic oligonucleotide
aagcatguagacactcacccacgauaacggtacaaggctaaagcuutgctaacggucgagcccatctatucaagcaaaaa

SEQ ID NO: 1089 - DNA, 20 bp, Artificial Sequence
  Description of Artificial Sequence: Synthetic primer
tgggacatagtgtggtgggg

SEQ ID NO: 1090 - DNA, 20 bp, Artificial Sequence
  Description of Artificial Sequence: Synthetic primer
ccatgagagtcccagacgcg

SEQ ID NO: 1091 - DNA, 189 bp, Artificial Sequence
  Description of Artificial Sequence: Synthetic polynucleotide
ccccaccacactatgtcccattctcacatttgccctgccccatgcccattatgcccctgctccacactcaatgctggccccgccacactgtggccctgccccatactcatcaatatgagtccccatgcctactctggccccaccccacagaccgctggctcgggcctggcgcgtctgggactctcatgg

SEQ ID NO: 1092 - DNA, 80 bp, Artificial Sequence
  Description of Artificial Sequence: Synthetic oligonucleotide
  Description of Combined DNA/RNA Molecule: Synthetic oligonucleotide
tgggacatagugtggtggggacgauaacggtacaaggctaaagcuutgctaacggucgagccatgagagucccagacgcg

SEQ ID NO: 1093 - DNA, 20 bp, Artificial Sequence
  Description of Artificial Sequence: Synthetic primer
ccatgagtttgaaaaacgta

SEQ ID NO: 1094 - DNA, 20 bp, Artificial Sequence
  Description of Artificial Sequence: Synthetic primer
ctatcagtccttggtggaac

SEQ ID NO: 1095 - DNA, 189 bp, Artificial Sequence
  Description of Artificial Sequence: Synthetic polynucleotide
ctatcagtccttggtggaacttcagcagcgagttactcacgcttcccctccatcggaagccagccaggccaaaacccagcaagatatgcagtccaggtaaggaaaggaagtagggaatgtgtttccaattagtttgtgtagatacaacttgtttttaacaaattattgtccatgagtttgaaaaacgta

SEQ ID NO: 1096 - DNA, 80 bp, Artificial Sequence
  Description of Artificial Sequence: Synthetic oligonucleotide
  Description of Combined DNA/RNA Molecule: Synthetic oligonucleotide
ccatgagttugaaaaacgtaacgauaacggtacaaggctaaagcuutgctaacggucgagctatcagtccutggtggaac

SEQ ID NO: 1097 - DNA, 20 bp, Artificial Sequence
  Description of Artificial Sequence: Synthetic primer
ttctttcattttaaaaatga

SEQ ID NO: 1098 - DNA, 20 bp, Artificial Sequence
  Description of Artificial Sequence: Synthetic primer
ccaactaaatagaattattc

SEQ ID NO: 1099 - DNA, 190 bp, Artificial Sequence
  Description of Artificial Sequence: Synthetic polynucleotide
tcatttttaaaatgaaagaaagctaactgaacaagataggtcataaaaattaatcttcttattactcaagattccctaagaattattgaaaaaattaaaaaaaaattccatatgggctattgttaacactttatactttagaatccatacctttagcagcctgtcgaagagaataattctatttagttgg

SEQ ID NO: 1100 - DNA, 80 bp, Artificial Sequence
  Description of Artificial Sequence: Synthetic oligonucleotide
  Description of Combined DNA/RNA Molecule: Synthetic oligonucleotide
ttctttcatuttaaaaatgaacgauaacggtacaaggctaaagcuutgctaacggucgagccaactaaauagaattattc

SEQ ID NO: 1101 - DNA, 20 bp, Artificial Sequence
  Description of Artificial Sequence: Synthetic primer
gtgtagttagagaataatat

SEQ ID NO: 1102 - DNA, 20 bp, Artificial Sequence
  Description of Artificial Sequence: Synthetic primer
cagaagttccactgatgtgt

SEQ ID NO: 1103 - DNA, 190 bp, Artificial Sequence
  Description of Artificial Sequence: Synthetic polynucleotide
atattattctctaactacacttaaaaaaaattctctataacaatcgtatggaagaaaaaccctcacagacttttagacatcgtagcttcacattaagaaaatttaagtgtaaaatggtaggtagaaaagagatatttttggattacttactcaagttggtcataattaacacacatcagtggaacttctg

SEQ ID NO: 1104 - DNA, 80 bp, Artificial Sequence
  Description of Artificial Sequence: Synthetic oligonucleotide
  Description of Combined DNA/RNA Molecule: Synthetic oligonucleotide
gtgtagtuagagaataatatacgauaacggtacaaggctaaagcuutgctaacggucgagcagaagtuccactgatgtgt

SEQ ID NO: 1105 - DNA, 20 bp, Artificial Sequence
  Description of Artificial Sequence: Synthetic primer
cacagatgaggacaggctga

SEQ ID NO: 1106 - DNA, 20 bp, Artificial Sequence
  Description of Artificial Sequence: Synthetic primer
cgatttcctcatatttgaac

SEQ ID NO: 1107 - DNA, 190 bp, Artificial Sequence
  Description of Artificial Sequence: Synthetic polynucleotide
tcagcctgtcctcatctgtggccaagaggtgacctggggtgcacttgggctcttctactctgtgggagtaggggaggaggcaggttgactaaggggcagatggctggaagggcagggggcactaagggaactgcctgtgtctccccctaggtgaatggcagtgatggcatgttcaaatatgaggaaatcg

SEQ ID NO: 1108 - DNA, 80 bp, Artificial Sequence
  Description of Artificial Sequence: Synthetic oligonucleotide
  Description of Combined DNA/RNA Molecule: Synthetic oligonucleotide
cacagaugaggacaggctgaacgauaacggtacaaggctaaagcuutgctaacggucgagcgatttccucatatttgaac

SEQ ID NO: 1109 - DNA, 20 bp, Artificial Sequence
  Description of Artificial Sequence: Synthetic primer
accagcctcctgaagagcag

SEQ ID NO: 1110 - DNA, 20 bp, Artificial Sequence
  Description of Artificial Sequence: Synthetic primer
ctgcatcctgatcctgggcc

SEQ ID NO: 1111 - DNA, 190 bp, Artificial Sequence
  Description of Artificial Sequence: Synthetic polynucleotide
ctgctcttcaggaggctggtggtgactatcctgccgtctcaggtgaaatttggcttccgtctgggtagtgaacgtgcagctgacagcacaaaaccgaagggggcgccgccaggccgtgggaaaggtgcgcgcaagggcgtgggcactcaccgtcttcccagcattgtccaggcccaggatcaggatgcag

SEQ ID NO: 1112 - DNA, 80 bp, Artificial Sequence
  Description of Artificial Sequence: Synthetic oligonucleotide
  Description of Combined DNA/RNA Molecule: Synthetic oligonucleotide
accagcctccugaagagcagacgauaacggtacaaggctaaagcuutgctaacggucgagctgcatccugatcctgggcc

SEQ ID NO: 1113 - DNA, 20 bp, Artificial Sequence
  Description of Artificial Sequence: Synthetic primer
attcacattccaactctgct

SEQ ID NO: 1114 - DNA, 20 bp, Artificial Sequence
  Description of Artificial Sequence: Synthetic primer
ccagctgctcttcacacagg

SEQ ID NO: 1115 - DNA, 190 bp, Artificial Sequence
  Description of Artificial Sequence: Synthetic polynucleotide
ccagctgctcttcacacagggttctggggaaaacaaggaaggtcagtgctaaccactttcccctgtagtgtgccttgggtgtcttcctccaccattccctttgtctctccaatattggggttctccaatagagcaactgatgaagtgggctctggaattccatggcctggattcacattccaactctgct

SEQ ID NO: 1116 - DNA, 80 bp, Artificial Sequence
  Description of Artificial Sequence: Synthetic oligonucleotide
  Description of Combined DNA/RNA Molecule: Synthetic oligonucleotide
attcacatuccaactctgctacgauaacggtacaaggctaaagcuutgctaacggucgagccagctgcucttcacacagg

SEQ ID NO: 1117 - DNA, 20 bp, Artificial Sequence
  Description of Artificial Sequence: Synthetic primer
tctcacatgctaattcaagg

SEQ ID NO: 1118 - DNA, 20 bp, Artificial Sequence
  Description of Artificial Sequence: Synthetic primer
ctttaactttcaaaaagata

SEQ ID NO: 1119 - DNA, 191 bp, Artificial Sequence
  Description of Artificial Sequence: Synthetic polynucleotide
ccttgaattagcatgtgagaccattgagatcacagctgccccaaagtgtaaagaaatgcagaattctctcaataatgataaaaaccttgtttctattgagactgtggtgccacctaagctcttaagtgataatttatgtagacaaactgaaaatctcaaaacatcaaaaagtatctttttgaaagttaaag

SEQ ID NO: 1120 - DNA, 80 bp, Artificial Sequence
  Description of Artificial Sequence: Synthetic oligonucleotide
  Description of Combined DNA/RNA Molecule: Synthetic oligonucleotide
tctcacatgcuaattcaaggacgauaacggtacaaggctaaagcuutgctaacggucgagctttaacttucaaaaagata

SEQ ID NO: 1121 - DNA, 20 bp, Artificial Sequence
  Description of Artificial Sequence: Synthetic primer
cagccacaaagtaaaaatgt

SEQ ID NO: 1122 - DNA, 20 bp, Artificial Sequence
  Description of Artificial Sequence: Synthetic primer
cttactgatccgaagatcca

SEQ ID NO: 1123 - DNA, 191 bp, Artificial Sequence
  Description of Artificial Sequence: Synthetic polynucleotide
cttactgatccgaagatccaggcgctgcttcttactgttctagtaaggatttcccctttttgagtcccccaccctcaaatttttattccagtctacttttaggaggcccttaaatattaaaaacatgaataggatacagtcttctacttctcacccaaacagataacaattcagccacaaagtaaaaatgt

SEQ ID NO: 1124 - DNA, 80 bp, Artificial Sequence
  Description of Artificial Sequence: Synthetic oligonucleotide
  Description of Combined DNA/RNA Molecule: Synthetic oligonucleotide
cagccacaaaguaaaaatgtacgauaacggtacaaggctaaagcuutgctaacggucgagcttactgauccgaagatcca

SEQ ID NO: 1125 - DNA, 20 bp, Artificial Sequence
  Description of Artificial Sequence: Synthetic primer
gaatccactgcttattacca

SEQ ID NO: 1126 - DNA, 20 bp, Artificial Sequence
  Description of Artificial Sequence: Synthetic primer
caggatttccattttattct

SEQ ID NO: 1127 - DNA, 191 bp, Artificial Sequence
  Description of Artificial Sequence: Synthetic polynucleotide
tggtaataagcagtggattcctttcttctcacagtggatttgtgtgtataaaagaatagaagaggtggttcattttaaactatgcaatgtaatattatgcatgttactttaaagagtataacttttgctctttttcatttctgcacccagattcaaaggattccaaggagaagaataaaatggaaatcctg

SEQ ID NO: 1128 - DNA, 80 bp, Artificial Sequence
  Description of Artificial Sequence: Synthetic oligonucleotide
  Description of Combined DNA/RNA Molecule: Synthetic oligonucleotide
gaatccacugcttattaccaacgauaacggtacaaggctaaagcuutgctaacggucgagcaggattuccattttattct

SEQ ID NO: 1129 - DNA, 20 bp, Artificial Sequence
  Description of Artificial Sequence: Synthetic primer
aaagggaaaattagagcctg

SEQ ID NO: 1130 - DNA, 20 bp, Artificial Sequence
  Description of Artificial Sequence: Synthetic primer
cacaatgtccacagaagttt

SEQ ID NO: 1131 - DNA, 191 bp, Artificial Sequence
  Description of Artificial Sequence: Synthetic polynucleotide
caggctctaattttccctttgcccccaatacacacaaagcatcatggtggcccagggtgagtgatactgtgaatccagatttaaaatgcccctgtttactataagaatagcaactgagttcaatcccagtcctccccatgaggacattacctgcagctctgtttggaagaaaaacttctgtggacattgtg

SEQ ID NO: 1132 - DNA, 80 bp, Artificial Sequence
  Description of Artificial Sequence: Synthetic oligonucleotide
  Description of Combined DNA/RNA Molecule: Synthetic oligonucleotide
aaagggaaaautagagcctgacgauaacggtacaaggctaaagcuutgctaacggucgagcacaatguccacagaagttt

SEQ ID NO: 1133 - DNA, 20 bp, Artificial Sequence
  Description of Artificial Sequence: Synthetic primer
ggctttgccttgcttttggc

SEQ ID NO: 1134 - DNA, 20 bp, Artificial Sequence
  Description of Artificial Sequence: Synthetic primer
caaggaatgaagaaaggaag

SEQ ID NO: 1135 - DNA, 191 bp, Artificial Sequence
  Description of Artificial Sequence: Synthetic polynucleotide
caaggaatgaagaaaggaagggagggatgggggaggcgggagggagggaagaaaactggagcaagtgaacatgatattctccaatcttctgcaggttttcctcttctgatctgcatcatttcactgtcatttgccatggacagttacggaacaagcaacaagtaagtgcagggctttgccttgcttttggc

SEQ ID NO: 1136 - DNA, 80 bp, Artificial Sequence
  Description of Artificial Sequence: Synthetic oligonucleotide
  Description of Combined DNA/RNA Molecule: Synthetic oligonucleotide
ggctttgccutgcttttggcacgauaacggtacaaggctaaagcuutgctaacggucgagcaaggaaugaagaaaggaag

SEQ ID NO: 1137 - DNA, 20 bp, Artificial Sequence
  Description of Artificial Sequence: Synthetic primer
tgctgccttgctcctagcag

SEQ ID NO: 1138 - DNA, 20 bp, Artificial Sequence
  Description of Artificial Sequence: Synthetic primer
cttcataccatgccgattgc

SEQ ID NO: 1139 - DNA, 191 bp, Artificial Sequence
  Description of Artificial Sequence: Synthetic polynucleotide
cttcataccatgccgattgcagacccacaacctttagactgaggtcttttaccgttggggcccttaaccttatcaggatggtggactacaaaatacaatcctgtttataatctgaagatatatttcacttttgttctgctttatcttttcataaagggttgaaaatgtgtttgctgccttgctcctagcag

SEQ ID NO: 1140 - DNA, 80 bp, Artificial Sequence
  Description of Artificial Sequence: Synthetic oligonucleotide
  Description of Combined DNA/RNA Molecule: Synthetic oligonucleotide
tgctgcctugctcctagcagacgauaacggtacaaggctaaagcuutgctaacggucgagcttcataccaugccgattgc

SEQ ID NO: 1141 - DNA, 20 bp, Artificial Sequence
  Description of Artificial Sequence: Synthetic primer
taatttttaaaaattgatta

SEQ ID NO: 1142 - DNA, 20 bp, Artificial Sequence
  Description of Artificial Sequence: Synthetic primer
cccataatgtattcttggtc

SEQ ID NO: 1143 - DNA, 192 bp, Artificial Sequence
  Description of Artificial Sequence: Synthetic polynucleotide
taatcaatttttaaaaattacttcaagtgttattttgatagctttttagaatttatactgtcttgattcaccttgacaataaaattatctatgcttttttacttcaaataagttattatcaaataagcagaagatatcttatttacataccataaaattctgctgtaggggagaccaagaatacattatggg

SEQ ID NO: 1144 - DNA, 80 bp, Artificial Sequence
  Description of Artificial Sequence: Synthetic oligonucleotide
  Description of Combined DNA/RNA Molecule: Synthetic oligonucleotide
taattttuaaaaattgattaacgauaacggtacaaggctaaagcuutgctaacggucgagcccataatguattcttggtc

SEQ ID NO: 1145 - DNA, 20 bp, Artificial Sequence
  Description of Artificial Sequence: Synthetic primer
cttgtggggacactaactct

SEQ ID NO: 1146 - DNA, 20 bp, Artificial Sequence
  Description of Artificial Sequence: Synthetic primer
caggccgtcctcgggccgca

SEQ ID NO: 1147 - DNA, 192 bp, Artificial Sequence
  Description of Artificial Sequence: Synthetic polynucleotide
caggccgtcctcgggccgcagcttggcctgcacaaatggctccctggaaggtggtccagggggactatcaggccacctggggccactctggacccatacccgggaacaatgacactcattacctacttagagggcacacacacagctaggacaagtgtcagacacagccactcttgtggggacactaactct

SEQ ID NO: 1148 - DNA, 80 bp, Artificial Sequence
  Description of Artificial Sequence: Synthetic oligonucleotide
  Description of Combined DNA/RNA Molecule: Synthetic oligonucleotide
cttgtggggacacuaactctacgauaacggtacaaggctaaagcuutgctaacggucgagcaggccgtccucgggccgca

SEQ ID NO: 1149 - DNA, 20 bp, Artificial Sequence
  Description of Artificial Sequence: Synthetic primer
ccctgcaggtagccctggtt

SEQ ID NO: 1150 - DNA, 20 bp, Artificial Sequence
  Description of Artificial Sequence: Synthetic primer
cccaggatgggcagcagcac

SEQ ID NO: 1151 - DNA, 192 bp, Artificial Sequence
  Description of Artificial Sequence: Synthetic polynucleotide
aaccagggctacctgcagggaggaccccaggtcttgctcccggcagggcggtgcctgcacccatctggaagcctggcgtctcgagggcagtcctcacagcctgcacctgccctcctgccactcagggtgactgtcactgtttctctccaggttgacagccaaggcagtggccgtgctgctgcccatcctggg

SEQ ID NO: 1152 - DNA, 80 bp, Artificial Sequence
  Description of Artificial Sequence: Synthetic oligonucleotide
  Description of Combined DNA/RNA Molecule: Synthetic oligonucleotide
ccctgcagguagccctggttacgauaacggtacaaggctaaagcuutgctaacggucgagcccaggaugggcagcagcac

SEQ ID NO: 1153 - DNA, 20 bp, Artificial Sequence
  Description of Artificial Sequence: Synthetic primer
gtcatgcagaaagcaggacg

SEQ ID NO: 1154 - DNA, 20 bp, Artificial Sequence
  Description of Artificial Sequence: Synthetic primer
cacaatcaaggacacagtgg

SEQ ID NO: 1155 - DNA, 192 bp, Artificial Sequence
  Description of Artificial Sequence: Synthetic polynucleotide
cacaatcaaggacacagtggcctggctcaaaatggacaagaaggttgggctagaactcgatgaaactggtggggctgacgtgagctttccagtttttccctgagcaggcgcctagctcatcactggggcgctgtagctgtatagtagagaagggggcacattcctgaattaagtcatgcagaaagcaggacg

SEQ ID NO: 1156 - DNA, 80 bp, Artificial Sequence
  Description of Artificial Sequence: Synthetic oligonucleotide
  Description of Combined DNA/RNA Molecule: Synthetic oligonucleotide
gtcaugcagaaagcaggacgacgauaacggtacaaggctaaagcuutgctaacggucgagcacaaucaaggacacagtgg

SEQ ID NO: 1157 - DNA, 20 bp, Artificial Sequence
  Description of Artificial Sequence: Synthetic primer
ctgccagaagctagtgacac

SEQ ID NO: 1158 - DNA, 20 bp, Artificial Sequence
  Description of Artificial Sequence: Synthetic primer
cagcatgacagcatattctt

SEQ ID NO: 1159 - DNA, 192 bp, Artificial Sequence
  Description of Artificial Sequence: Synthetic polynucleotide
gtgtcactagcttctggcagccgtctcttggcacacaggccacagtgcttaggatagtttgtggcgctttgtctggattttagcaactggcatctgcttttcatgctagttcccccgcctgcctttgatttgccctgtgttccattgcagaacgagatgctggaggagggccaagaatatgctgtcatgctg

SEQ ID NO: 1160 - DNA, 80 bp, Artificial Sequence
  Description of Artificial Sequence: Synthetic oligonucleotide
  Description of Combined DNA/RNA Molecule: Synthetic oligonucleotide
ctgccagaagcuagtgacacacgauaacggtacaaggctaaagcuutgctaacggucgagcagcaugacagcatattctt

SEQ ID NO: 1161 - DNA, 20 bp, Artificial Sequence
  Description of Artificial Sequence: Synthetic primer
acctcccaaaaaaggatctg

SEQ ID NO: 1162 - DNA, 20 bp, Artificial Sequence
  Description of Artificial Sequence: Synthetic primer
ctttattaatgcgtaaagca

SEQ ID NO: 1163 - DNA, 192 bp, Artificial Sequence
  Description of Artificial Sequence: Synthetic polynucleotide
ctttattaatgcgtaaagcagctctgttatctctggctttttgctttgacaaaagaagagaaaaaaatttcccagattatgttaaatgttttaaggaataaaataaaactatcatgaactttctcaaataaaagaaaaaaaagtcaggtaaaatagctgaaatacttacggcacctcccaaaaaaggatctg

SEQ ID NO: 1164 - DNA, 80 bp, Artificial Sequence
  Description of Artificial Sequence: Synthetic oligonucleotide
  Description of Combined DNA/RNA Molecule: Synthetic oligonucleotide
acctcccaaaaaaggauctgacgauaacggtacaaggctaaagcuutgctaacggucgagctttattaaugcgtaaagca

SEQ ID NO: 1165 - DNA, 20 bp, Artificial Sequence
  Description of Artificial Sequence: Synthetic primer
actcttcatgtttagggtta

SEQ ID NO: 1166 - DNA, 20 bp, Artificial Sequence
  Description of Artificial Sequence: Synthetic primer
ccagctgctgctgtgtgatt

SEQ ID NO: 1167 - DNA, 192 bp, Artificial Sequence
  Description of Artificial Sequence: Synthetic polynucleotide
ccagctgctgctgtgtgatttcttccatttcttctctcagacgctatatatatgaggaggaaaaaaatcatctttacttatgactggcattcaaactgggcactgtggattctacagacaattacatttgcctaatcccgaaacgcaactacttccaaagtgaagggtggccactcttcatgtttagggtta

SEQ ID NO: 1168 - DNA, 80 bp, Artificial Sequence
  Description of Artificial Sequence: Synthetic oligonucleotide
  Description of Combined DNA/RNA Molecule: Synthetic oligonucleotide
actcttcaugtttagggttaacgauaacggtacaaggctaaagcuutgctaacggucgagccagctgcugctgtgtgatt

SEQ ID NO: 1169 - DNA, 20 bp, Artificial Sequence
  Description of Artificial Sequence: Synthetic primer
cagaagagtgttttttcata

SEQ ID NO: 1170 - DNA, 20 bp, Artificial Sequence
  Description of Artificial Sequence: Synthetic primer
cgatttgatcccaacttgaa

SEQ ID NO: 1171 - DNA, 192 bp, Artificial Sequence
  Description of Artificial Sequence: Synthetic polynucleotide
tatgaaaaaacactcttctgtatcattcctcaggaaaaggtgacccagcaagtcctgaaaagtgtgctttaatttgtttagcagtgaactaaatgtgcactgttttgtgtgtcgatttccaagcttctgaagaaggcaaaggttgcctcgttataccattgtgcaaaccgtgttcaagttgggatcaaatcg

SEQ ID NO: 1172 - DNA, 80 bp, Artificial Sequence
  Description of Artificial Sequence: Synthetic oligonucleotide
  Description of Combined DNA/RNA Molecule: Synthetic oligonucleotide
cagaagagugttttttcataacgauaacggtacaaggctaaagcuutgctaacggucgagcgatttgaucccaacttgaa

SEQ ID NO: 1173 - DNA, 20 bp, Artificial Sequence
  Description of Artificial Sequence: Synthetic primer
aatctgcctttgtttctacc

SEQ ID NO: 1174 - DNA, 20 bp, Artificial Sequence
  Description of Artificial Sequence: Synthetic primer
cttctgcagtctcactggtc

SEQ ID NO: 1175 - DNA, 192 bp, Artificial Sequence
  Description of Artificial Sequence: Synthetic polynucleotide
ggtagaaacaaaggcagatttgctggctgcataaaggcagacaggcagctggcctaagcaaaccaatggagtttgaagtgctgagggctgtggaggcaggggagggcagggaagtggggtgctgaggcaggacactgcttccctctccaggtgtgcgctatggacagcctgcgaccagtgagactgcagaag

SEQ ID NO: 1176 - DNA, 80 bp, Artificial Sequence
  Description of Artificial Sequence: Synthetic oligonucleotide
  Description of Combined DNA/RNA Molecule: Synthetic oligonucleotide
aatctgcctutgtttctaccacgauaacggtacaaggctaaagcuutgctaacggucgagcttctgcaguctcactggtc

SEQ ID NO: 1177 - DNA, 20 bp, Artificial Sequence
  Description of Artificial Sequence: Synthetic primer
tgatattgagaatattagtg

SEQ ID NO: 1178 - DNA, 20 bp, Artificial Sequence
  Description of Artificial Sequence: Synthetic primer
cagttgaaattaaacggaag

SEQ ID NO: 1179 - DNA, 192 bp, Artificial Sequence
  Description of Artificial Sequence: Synthetic polynucleotide
cagttgaaattaaacggaagtttgctggcctgttgaaaaatgactgtaacaaaagtgcttctggttatttaacagatgaaaatgaagtggggtttaggggcttttattctgctcatggcacaaaactgaatgtttctactgaagctctgcaaaaagctgtgaaactgtttagtgatattgagaatattagtg

SEQ ID NO: 1180 - DNA, 80 bp, Artificial Sequence
  Description of Artificial Sequence: Synthetic oligonucleotide
  Description of Combined DNA/RNA Molecule: Synthetic oligonucleotide
tgatatugagaatattagtgacgauaacggtacaaggctaaagcuutgctaacggucgagcagttgaaautaaacggaag

SEQ ID NO: 1181 - DNA, 20 bp, Artificial Sequence
  Description of Artificial Sequence: Synthetic primer
attttcctaaaaaacaagta

SEQ ID NO: 1182 - DNA, 20 bp, Artificial Sequence
  Description of Artificial Sequence: Synthetic primer
ctgatttcatgtctattgaa

SEQ ID NO: 1183 - DNA, 193 bp, Artificial Sequence
  Description of Artificial Sequence: Synthetic polynucleotide
ctgatttcatgtctattgaatccattttttctggttaagattctggcagtattatctaaaacaaattttaaaatattacaaatggtttgggatagtaaatttttcccaatgtgatcaccaaggtttaacatataaataaaaacatatttatgtaaaatataaaattgatatacattttcctaaaaaacaagta

SEQ ID NO: 1184 - DNA, 80 bp, Artificial Sequence
  Description of Artificial Sequence: Synthetic oligonucleotide
  Description of Combined DNA/RNA Molecule: Synthetic oligonucleotide
attttccuaaaaaacaagtaacgauaacggtacaaggctaaagcuutgctaacggucgagctgatttcaugtctattgaa

SEQ ID NO: 1185 - DNA, 20 bp, Artificial Sequence
  Description of Artificial Sequence: Synthetic primer
taaggatcacccaaaaagta

SEQ ID NO: 1186 - DNA, 20 bp, Artificial Sequence
  Description of Artificial Sequence: Synthetic primer
caggcatccttcacctgcta

SEQ ID NO: 1187 - DNA, 193 bp, Artificial Sequence
  Description of Artificial Sequence: Synthetic polynucleotide
caggcatccttcacctgctattgttgcaagaacagtcagaattttacatacactactaactctggttaacaaacacagaaattgtgacaaatttgaagtgaatacacagagcgtggcctacttagcaggtaaaaacacaaaataaacaaaattaatcttgctacatctatatataaggatcacccaaaaagta

SEQ ID NO: 1188 - DNA, 80 bp, Artificial Sequence
  Description of Artificial Sequence: Synthetic oligonucleotide
  Description of Combined DNA/RNA Molecule: Synthetic oligonucleotide
taaggaucacccaaaaagtaacgauaacggtacaaggctaaagcuutgctaacggucgagcaggcatccutcacctgcta

SEQ ID NO: 1189 - DNA, 20 bp, Artificial Sequence
  Description of Artificial Sequence: Synthetic primer
ttttactctctcaactgtat

SEQ ID NO: 1190 - DNA, 20 bp, Artificial Sequence
  Description of Artificial Sequence: Synthetic primer
ccatgaagaatccccaccac

SEQ ID NO: 1191 - DNA, 193 bp, Artificial Sequence
  Description of Artificial Sequence: Synthetic polynucleotide
ccatgaagaatccccaccacaataccaaacatcttacctgcaaagtaaataaatgtatctggagaaggatggttgatgaacttgctaacatgcgcgctgttgtagaatgcactgactacagaattctttataagggatagacttgttcatacttttatttccatattccatttttttactctctcaactgtat

SEQ ID NO: 1192 - DNA, 80 bp, Artificial Sequence
  Description of Artificial Sequence: Synthetic oligonucleotide
  Description of Combined DNA/RNA Molecule: Synthetic oligonucleotide
ttttactcuctcaactgtatacgauaacggtacaaggctaaagcuutgctaacggucgagccatgaagaauccccaccac

SEQ ID NO: 1193 - DNA, 20 bp, Artificial Sequence
  Description of Artificial Sequence: Synthetic primer
ggcccgtgaggacggagagg

SEQ ID NO: 1194 - DNA, 20 bp, Artificial Sequence
  Description of Artificial Sequence: Synthetic primer
cctctgaattcaggagacaa

SEQ ID NO: 1195 - DNA, 193 bp, Artificial Sequence
  Description of Artificial Sequence: Synthetic polynucleotide
cctctccgtcctcacgggccccaggtcatgggacctggtgtcacagtgtgcggtgccagtgccactcccaggctgcatgggaggaacctccagtgttcctaactacgtgcaaagggctctaatctctgcgtttcttccctttcttcccagggactgttcatattcctctttcattgtctcctgaattcagagg

SEQ ID NO: 1196 - DNA, 80 bp, Artificial Sequence
  Description of Artificial Sequence: Synthetic oligonucleotide
  Description of Combined DNA/RNA Molecule: Synthetic oligonucleotide
ggcccgugaggacggagaggacgauaacggtacaaggctaaagcuutgctaacggucgagcctctgaatucaggagacaa

SEQ ID NO: 1197 - DNA, 20 bp, Artificial Sequence
  Description of Artificial Sequence: Synthetic primer
ggtctggggacagtctgacc

SEQ ID NO: 1198 - DNA, 20 bp, Artificial Sequence
  Description of Artificial Sequence: Synthetic primer
ccacgtctgcatcgaagaca

SEQ ID NO: 1199 - DNA, 193 bp, Artificial Sequence
  Description of Artificial Sequence: Synthetic polynucleotide
ggtcagactgtccccagacctggctctgacaacacacatctggtccacctatgggctgtgtgggacgtgcagcattctaaggtctctggttttggggggtctgaggggcccatctcgcctgcactgaccaacgccctctgcatcctgcaggacaccgtggtggccacgctgcgtgtcttcgatgcagacgtgg

SEQ ID NO: 1200 - DNA, 80 bp, Artificial Sequence
  Description of Artificial Sequence: Synthetic oligonucleotide
  Description of Combined DNA/RNA Molecule: Synthetic oligonucleotide
ggtctggggacaguctgaccacgauaacggtacaaggctaaagcuutgctaacggucgagccacgtcugcatcgaagaca

SEQ ID NO: 1201 - DNA, 20 bp, Artificial Sequence
  Description of Artificial Sequence: Synthetic primer
accgcagcccggcggctgta

SEQ ID NO: 1202 - DNA, 20 bp, Artificial Sequence
  Description of Artificial Sequence: Synthetic primer
caaataaattgataaacgac

SEQ ID NO: 1203 - DNA, 193 bp, Artificial Sequence
  Description of Artificial Sequence: Synthetic polynucleotide
caaataaattgataaacgaccgctggcctacacagtccgttttcccgtgacagttcggacattcctagcttcttctcaagacaaggactggtagcagagatgcagggcatgtcctcatggcttctcgctctggcaggttcatgccccgggtagagattgtgcagaagcacaacaccgcagcccggcggctgta

SEQ ID NO: 1204 - DNA, 80 bp, Artificial Sequence
  Description of Artificial Sequence: Synthetic oligonucleotide
  Description of Combined DNA/RNA Molecule: Synthetic oligonucleotide
accgcagcccggcggcugtaacgauaacggtacaaggctaaagcuutgctaacggucgagcaaataaatugataaacgac

SEQ ID NO: 1205 - DNA, 20 bp, Artificial Sequence
  Description of Artificial Sequence: Synthetic primer
cagcaaaggtttgtatggta

SEQ ID NO: 1206 - DNA, 20 bp, Artificial Sequence
  Description of Artificial Sequence: Synthetic primer
caagggtcaggtgcctgaga

SEQ ID NO: 1207 - DNA, 193 bp, Artificial Sequence
  Description of Artificial Sequence: Synthetic polynucleotide
caagggtcaggtgcctgagaacgaggctaacgtcgtaatcaccacactgaaagtgactgatgctgatgcccccaataccccagcgtgggaggctgtatacaccatattgaatgatgatggtggacaatttgtcgtcaccacaaatccagtgaacaacgatggcattttgaaaacagcaaaggtttgtatggta

SEQ ID NO: 1208 - DNA, 80 bp, Artificial Sequence
  Description of Artificial Sequence: Synthetic oligonucleotide
  Description of Combined DNA/RNA Molecule: Synthetic oligonucleotide
cagcaaagguttgtatggtaacgauaacggtacaaggctaaagcuutgctaacggucgagcaagggtcaggugcctgaga

SEQ ID NO: 1209 - DNA, 20 bp, Artificial Sequence
  Description of Artificial Sequence: Synthetic primer
ggatcggagggcaggggagg

SEQ ID NO: 1210 - DNA, 20 bp, Artificial Sequence
  Description of Artificial Sequence: Synthetic primer
caacagctcctgcatcagca

SEQ ID NO: 1211 - DNA, 193 bp, Artificial Sequence
  Description of Artificial Sequence: Synthetic polynucleotide
caacagctcctgcatcagcaagccagagcagtgtggccctgaaggtgagtggctgatccctgcggcatctttgtcaagcatttcattctcagggagcacctgctcctctggtgactggaagatgtgaacctgaggttctcatcaattgcagaatgcgtgagaatgtcaacgatggatcggagggcaggggagg

SEQ ID NO: 1212 - DNA, 80 bp, Artificial Sequence
  Description of Artificial Sequence: Synthetic oligonucleotide
  Description of Combined DNA/RNA Molecule: Synthetic oligonucleotide
ggaucggagggcaggggaggacgauaacggtacaaggctaaagcuutgctaacggucgagcaacagctccugcatcagca

SEQ ID NO: 1213 - DNA, 20 bp, Artificial Sequence
  Description of Artificial Sequence: Synthetic primer
atcagccatgtctcttcgta

SEQ ID NO: 1214 - DNA, 20 bp, Artificial Sequence
  Description of Artificial Sequence: Synthetic primer
catttttaacctttatctat

SEQ ID NO: 1215 - DNA, 193 bp, Artificial Sequence
  Description of Artificial Sequence: Synthetic polynucleotide
catttttaacctttatctatatttgtctgtttttcaacagttcaagacccggcaggccccctaagcgttctttgggagtgttgcaggaaaatgcccgccttctgacccatgcagtcccaggcctcttatcgccaggacttatcactccgacaggtaataaaatccatctgatgatcagccatgtctcttcgta

SEQ ID NO: 1216 - DNA, 80 bp, Artificial Sequence
  Description of Artificial Sequence: Synthetic oligonucleotide
  Description of Combined DNA/RNA Molecule: Synthetic oligonucleotide
atcagccaugtctcttcgtaacgauaacggtacaaggctaaagcuutgctaacggucgagcatttttaaccuttatctat

SEQ ID NO: 1217 - DNA, 20 bp, Artificial Sequence
  Description of Artificial Sequence: Synthetic primer
tcactcgaaaaatggagacg

SEQ ID NO: 1218 - DNA, 20 bp, Artificial Sequence
  Description of Artificial Sequence: Synthetic primer
ccaatctcctgtaaaagaat

SEQ ID NO: 1219 - DNA, 193 bp, Artificial Sequence
  Description of Artificial Sequence: Synthetic polynucleotide
ccaatctcctgtaaaagaattagataaattcaaattagacttaggtaagtaatgcaatatggtagactggggagaactacaaactaggaatttaggcaaacctgtgttaaaatcttagctcattcattaattgtgtcatgctgggcaaatcagtctctctggcctctttttcctcactcgaaaaatggagacg

SEQ ID NO: 1220 - DNA, 80 bp, Artificial Sequence
  Description of Artificial Sequence: Synthetic oligonucleotide
  Description of Combined DNA/RNA Molecule: Synthetic oligonucleotide
tcactcgaaaaauggagacgacgauaacggtacaaggctaaagcuutgctaacggucgagccaatctccugtaaaagaat

SEQ ID NO: 1221 - DNA, 20 bp, Artificial Sequence
  Description of Artificial Sequence: Synthetic primer
tttaatatcgctaataattt

SEQ ID NO: 1222 - DNA, 20 bp, Artificial Sequence
  Description of Artificial Sequence: Synthetic primer
catatcagggggttctctgt

SEQ ID NO: 1223 - DNA, 194 bp, Artificial Sequence
  Description of Artificial Sequence: Synthetic polynucleotide
catatcagggggttctctgttctccctccttcatgagcagaagaggtatgggtcttttgttctgatttatccttggacattccgtagaaactactcttgcaatacttcagagggtttcccattggatgagccttcaccttttgaaatctgagtgctgctagcaagtgtgtcatttttaatatcgctaataattt

SEQ ID NO: 1224 - DNA, 80 bp, Artificial Sequence
  Description of Artificial Sequence: Synthetic oligonucleotide
  Description of Combined DNA/RNA Molecule: Synthetic oligonucleotide
tttaataucgctaataatttacgauaacggtacaaggctaaagcuutgctaacggucgagcatatcagggggutctctgt

SEQ ID NO: 1225 - DNA, 20 bp, Artificial Sequence
  Description of Artificial Sequence: Synthetic primer
tcccatccccagcatcttcc

SEQ ID NO: 1226 - DNA, 20 bp, Artificial Sequence
  Description of Artificial Sequence: Synthetic primer
ctccacgatgtccttcagct

SEQ ID NO: 1227 - DNA, 194 bp, Artificial Sequence
  Description of Artificial Sequence: Synthetic polynucleotide
ggaagatgctggggatgggacgttgtggctgtccttatagccaggcttgatggcggtgtcagaacggcaggtgctcctggctgtggacccaggctgctagggcccggccccctccagtcccccaaccccacctcactcccgccaccgtaggtatcctggagttcttccaccaccagctgaaggacatcgtggag

SEQ ID NO: 1228 - DNA, 80 bp, Artificial Sequence
  Description of Artificial Sequence: Synthetic oligonucleotide
  Description of Combined DNA/RNA Molecule: Synthetic oligonucleotide
tcccauccccagcatcttccacgauaacggtacaaggctaaagcuutgctaacggucgagctccacgaugtccttcagct

SEQ ID NO: 1229 - DNA, 20 bp, Artificial Sequence
  Description of Artificial Sequence: Synthetic primer
caggagctatttcttgcaca

SEQ ID NO: 1230 - DNA, 20 bp, Artificial Sequence
  Description of Artificial Sequence: Synthetic primer
ctcgggcagctcctttcgcg

SEQ ID NO: 1231 - DNA, 194 bp, Artificial Sequence
  Description of Artificial Sequence: Synthetic polynucleotide
tgtgcaagaaatagctcctgagctgagttggaatttctcatccttaaacaatgtgggaacctgctgaggtggggtgggggctcccgggtgggcggactcgggggtgatagccgccggttctgccttgcagcagcagtggacgtcagctcagcgaggtcttcatccagctgccctcgcgaaaggagctgcccgag

SEQ ID NO: 1232 - DNA, 80 bp, Artificial Sequence
  Description of Artificial Sequence: Synthetic oligonucleotide
  Description of Combined DNA/RNA Molecule: Synthetic oligonucleotide
caggagctauttcttgcacaacgauaacggtacaaggctaaagcuutgctaacggucgagctcgggcagcucctttcgcg

SEQ ID NO: 1233 - DNA, 20 bp, Artificial Sequence
  Description of Artificial Sequence: Synthetic primer
aaataaaatatggtgattta

SEQ ID NO: 1234 - DNA, 20 bp, Artificial Sequence
  Description of Artificial Sequence: Synthetic primer
ctggcgtatttctcttacca

SEQ ID NO: 1235 - DNA, 194 bp, Artificial Sequence
  Description of Artificial Sequence: Synthetic polynucleotide
ctggcgtatttctcttaccagtgtgtaaaaagcatcttcaacaccctataaaaggaaaaaatgaaaaaaaatgagagagctagctcaacggacacaatccaaattataagctctcttgcatttgtatctctttatgtggacataagattccaattactaaacgaatagctgataaaataaaatatggtgattta

SEQ ID NO: 1236 - DNA, 80 bp, Artificial Sequence
  Description of Artificial Sequence: Synthetic oligonucleotide
  Description of Combined DNA/RNA Molecule: Synthetic oligonucleotide
aaataaaauatggtgatttaacgauaacggtacaaggctaaagcuutgctaacggucgagctggcgtatutctcttacca

SEQ ID NO: 1237 - DNA, 20 bp, Artificial Sequence
  Description of Artificial Sequence: Synthetic primer
aataagctttgggtatgtaa

SEQ ID NO: 1238 - DNA, 20 bp, Artificial Sequence
  Description of Artificial Sequence: Synthetic primer
cttctgacagtgccctcaga

SEQ ID NO: 1239 - DNA, 194 bp, Artificial Sequence
  Description of Artificial Sequence: Synthetic polynucleotide
ttacatacccaaagcttattagtttttgcctggcctgtctcaagatgcttttgctctcagtagtgtagtgatacttttataaaatatttgtttaatttttctgaacatgtttgggatgggctatatgaggggaatctttgttatttataggcaaaaaaggatccacctgcagactctgagggcactgtcagaag

SEQ ID NO: 1240 - DNA, 80 bp, Artificial Sequence
  Description of Artificial Sequence: Synthetic oligonucleotide
  Description of Combined DNA/RNA Molecule: Synthetic oligonucleotide
aataagcttugggtatgtaaacgauaacggtacaaggctaaagcuutgctaacggucgagcttctgacagugccctcaga

SEQ ID NO: 1241 - DNA, 20 bp, Artificial Sequence
  Description of Artificial Sequence: Synthetic primer
cttacctctctccaccaatc

SEQ ID NO: 1242 - DNA, 20 bp, Artificial Sequence
  Description of Artificial Sequence: Synthetic primer
ctgggcactttctagcgttg

SEQ ID NO: 1243 - DNA, 194 bp, Artificial Sequence
  Description of Artificial Sequence: Synthetic polynucleotide
gattggtggagagaggtaagtaagggaacctagttgatactatgaagagtgtgtatagatttgaggatctgaaaattccaccgttttcttttttgcttgttgagtgaatacataaggttcaaaaaacccattaacctttttcttttgcagctgtcgtgagcgccatcccggtgccaacgctagaaagtgcccag

SEQ ID NO: 1244 - DNA, 80 bp, Artificial Sequence
  Description of Artificial Sequence: Synthetic oligonucleotide
  Description of Combined DNA/RNA Molecule: Synthetic oligonucleotide
cttacctcuctccaccaatcacgauaacggtacaaggctaaagcuutgctaacggucgagctgggcactutctagcgttg

SEQ ID NO: 1245 - DNA, 20 bp, Artificial Sequence
  Description of Artificial Sequence: Synthetic primer
agaaagcaagagcataggtg

SEQ ID NO: 1246 - DNA, 20 bp, Artificial Sequence
  Description of Artificial Sequence: Synthetic primer
cttcctgcaccactcttggg

SEQ ID NO: 1247 - DNA, 194 bp, Artificial Sequence
  Description of Artificial Sequence: Synthetic polynucleotide
cttcctgcaccactcttgggcctccattaaatctcgaccataggcctgagagagaaagcaggcacgttttcaagttatcaaagtctcaaccaacccaggaggcaaaatccccaggctgactgcagatattcctcaggagcccgctgtggcctgaaaacactggcagggggctggagaaagcaagagcataggtg

SEQ ID NO: 1248 - DNA, 80 bp, Artificial Sequence
  Description of Artificial Sequence: Synthetic oligonucleotide
  Description of Combined DNA/RNA Molecule: Synthetic oligonucleotide
agaaagcaagagcauaggtgacgauaacggtacaaggctaaagcuutgctaacggucgagcttccugcaccactcttggg

SEQ ID NO: 1249 - DNA, 20 bp, Artificial Sequence
  Description of Artificial Sequence: Synthetic primer
tcaaactccgattttcaatc

SEQ ID NO: 1250 - DNA, 20 bp, Artificial Sequence
  Description of Artificial Sequence: Synthetic primer
ctgactttggtatgtgtgtt

SEQ ID NO: 1251 - DNA, 194 bp, Artificial Sequence
  Description of Artificial Sequence: Synthetic polynucleotide
gattgaaaatcggagtttgagatgcaagtataggtatctgtggttgatgcagttttcctaaaacgtcatgattttcaatggcaagtaagttatttatggtcgtttttaaggataagctgttaacgtgttttttttttctttttttttcagcttccaataaaaacaggacagcagaacacacataccaaagtcag

SEQ ID NO: 1252 - DNA, 80 bp, Artificial Sequence
  Description of Artificial Sequence: Synthetic oligonucleotide
  Description of Combined DNA/RNA Molecule: Synthetic oligonucleotide
tcaaactccgautttcaatcacgauaacggtacaaggctaaagcuutgctaacggucgagctgactttgguatgtgtgtt

SEQ ID NO: 1253 - DNA, 20 bp, Artificial Sequence
  Description of Artificial Sequence: Synthetic primer
ctcaaaccaagcgagaagta

SEQ ID NO: 1254 - DNA, 20 bp, Artificial Sequence
  Description of Artificial Sequence: Synthetic primer
cttctgtcagttcacttgat

SEQ ID NO: 1255 - DNA, 194 bp, Artificial Sequence
  Description of Artificial Sequence: Synthetic polynucleotide
cttctgtcagttcacttgatagttttgagagtcgttcgattgccagctccgttcagagtgaaccatgcagtggaatggtaagtggcattataagccccagtgatcttccagatagccctggacaaaccatgccaccaagcagaagtaaaacacctccaccacctcctcaaacagctcaaaccaagcgagaagta

SEQ ID NO: 1256 - DNA, 80 bp, Artificial Sequence
  Description of Artificial Sequence: Synthetic oligonucleotide
  Description of Combined DNA/RNA Molecule: Synthetic oligonucleotide
ctcaaaccaagcgagaaguaacgauaacggtacaaggctaaagcuutgctaacggucgagcttctgtcagutcacttgat

SEQ ID NO: 1257 - DNA, 20 bp, Artificial Sequence
  Description of Artificial Sequence: Synthetic primer
attgttttccttcatttctt

SEQ ID NO: 1258 - DNA, 20 bp, Artificial Sequence
  Description of Artificial Sequence: Synthetic primer
cataagaggcaaaaatttat

SEQ ID NO: 1259 - DNA, 195 bp, Artificial Sequence
  Description of Artificial Sequence: Synthetic polynucleotide
aagaaatgaaggaaaacaatatagttagtgaagttttgttaaccacttgtgctaatagaggagcactgtcttaaaataacttacttgcttagatgtgagaatatttgaaataccttgtttcttaattttgtgtcttttttttaatggtagagagacggaatgaagattccaacatataaatttttgcctcttatg

SEQ ID NO: 1260 - DNA, 80 bp, Artificial Sequence
  Description of Artificial Sequence: Synthetic oligonucleotide
  Description of Combined DNA/RNA Molecule: Synthetic oligonucleotide
attgttttccutcatttcttacgauaacggtacaaggctaaagcuutgctaacggucgagcataagaggcaaaaauttat

SEQ ID NO: 1261 - DNA, 20 bp, Artificial Sequence
  Description of Artificial Sequence: Synthetic primer
aaatgtattttctttagaga

SEQ ID NO: 1262 - DNA, 20 bp, Artificial Sequence
  Description of Artificial Sequence: Synthetic primer
catgttcaccttccaggcca

SEQ ID NO: 1263 - DNA, 195 bp, Artificial Sequence
  Description of Artificial Sequence: Synthetic polynucleotide
tctctaaagaaaatacatttctatagcctaatttctgtgtattgccttgcatacctagtgaccaaaaaaagtgatctttttcctgtttgacactttacactgagggaaagaaggcccctcacgtcctgtgtcacgttctttcactgccaggtggaagtgagctgtccgaaggagatggcctggaaggtgaacatg

SEQ ID NO: 1264 - DNA, 80 bp, Artificial Sequence
  Description of Artificial Sequence: Synthetic oligonucleotide
  Description of Combined DNA/RNA Molecule: Synthetic oligonucleotide
aaatgtattutctttagagaacgauaacggtacaaggctaaagcuutgctaacggucgagcatgttcaccutccaggcca

SEQ ID NO: 1265 - DNA, 20 bp, Artificial Sequence
  Description of Artificial Sequence: Synthetic primer
acaaattcaggtaagaagga

SEQ ID NO: 1266 - DNA, 20 bp, Artificial Sequence
  Description of Artificial Sequence: Synthetic primer
cttttaatcacaggccaagc

SEQ ID NO: 1267 - DNA, 195 bp, Artificial Sequence
  Description of Artificial Sequence: Synthetic polynucleotide
cttttaatcacaggccaagcaactgaaacattaactcattgtatctccaggtcatcaccgagtggtcttctcacatcatccttcaggcagcaccaagagtcactggcagcagagagagagaggcggcggcaggagagagaagaaaggttgcagagaatagagcgggaagaaagaaacaaattcaggtaagaagga

SEQ ID NO: 1268 - DNA, 80 bp, Artificial Sequence
  Description of Artificial Sequence: Synthetic oligonucleotide
  Description of Combined DNA/RNA Molecule: Synthetic oligonucleotide
acaaattcagguaagaaggaacgauaacggtacaaggctaaagcuutgctaacggucgagcttttaaucacaggccaagc

SEQ ID NO: 1269 - DNA, 20 bp, Artificial Sequence
  Description of Artificial Sequence: Synthetic primer
aagacttggtggctgtgatc

SEQ ID NO: 1270 - DNA, 20 bp, Artificial Sequence
  Description of Artificial Sequence: Synthetic primer
caatgctctacaatctctaa

SEQ ID NO: 1271 - DNA, 195 bp, Artificial Sequence
  Description of Artificial Sequence: Synthetic polynucleotide
caatgctctacaatctctaagagacagagaattctctacattttatgaaagtctcaaatatgccaggtattatgaaaagacaaagttactgtattttaacatttaatgtcatggcttcttttctgaaaacttgagaaacaattttaatgtaaggatttgcattgatgaagagataaagacttggtggctgtgatc

SEQ ID NO: 1272 - DNA, 80 bp, Artificial Sequence
  Description of Artificial Sequence: Synthetic oligonucleotide
  Description of Combined DNA/RNA Molecule: Synthetic oligonucleotide
aagacttgguggctgtgatcacgauaacggtacaaggctaaagcuutgctaacggucgagcaatgctcuacaatctctaa

SEQ ID NO: 1273 - DNA, 20 bp, Artificial Sequence
  Description of Artificial Sequence: Synthetic primer
acagcctggaactccagtca

SEQ ID NO: 1274 - DNA, 20 bp, Artificial Sequence
  Description of Artificial Sequence: Synthetic primer
cgagtttgacaagtgggccc

SEQ ID NO: 1275 - DNA, 195 bp, Artificial Sequence
  Description of Artificial Sequence: Synthetic polynucleotide
cgagtttgacaagtgggccccctccgtggtgaaggtgtcttacaaggtaggtcacagccactgaggtttcctctcttgctacggaggtgcaggcggtggtgggcaggacgtccacacatacctctggacagtgaacctgagaatgctgggtctccagtcgcatggagtctccaggacagcctggaactccagtca

SEQ ID NO: 1276 - DNA, 80 bp, Artificial Sequence
  Description of Artificial Sequence: Synthetic oligonucleotide
  Description of Combined DNA/RNA Molecule: Synthetic oligonucleotide
acagccuggaactccagtcaacgauaacggtacaaggctaaagcuutgctaacggucgagcgagttugacaagtgggccc

SEQ ID NO: 1277 - DNA, 20 bp, Artificial Sequence
  Description of Artificial Sequence: Synthetic primer
agaccgtatttggtctggaa

SEQ ID NO: 1278 - DNA, 20 bp, Artificial Sequence
  Description of Artificial Sequence: Synthetic primer
ccagcacctgttgaaattcc

SEQ ID NO: 1279 - DNA, 195 bp, Artificial Sequence
  Description of Artificial Sequence: Synthetic polynucleotide
ttccagaccaaatacggtcttaaaatgagcatctgtaagctcactaatgtcatttttgtattaatttgagaaactgatctttgcaaacgtgtattaaaatgatttgaggagatatgaatagggtccagcattatcaacttctttactcaccgagaccaaagttggtggagtaacaggaatttcaacaggtgctgg

SEQ ID NO: 1280 - DNA, 80 bp, Artificial Sequence
  Description of Artificial Sequence: Synthetic oligonucleotide
  Description of Combined DNA/RNA Molecule: Synthetic oligonucleotide
agaccgtatutggtctggaaacgauaacggtacaaggctaaagcuutgctaacggucgagccagcaccugttgaaattcc

SEQ ID NO: 1281 - DNA, 20 bp, Artificial Sequence
  Description of Artificial Sequence: Synthetic primer
gccgtcttgccatggcaggg

SEQ ID NO: 1282 - DNA, 20 bp, Artificial Sequence
  Description of Artificial Sequence: Synthetic primer
ctttcctggccagcatacgc

SEQ ID NO: 1283 - DNA, 195 bp, Artificial Sequence
  Description of Artificial Sequence: Synthetic polynucleotide
ccctgccatggcaagacggccaatggccttggatgccatttccatgacaactgggtcattggaggggaggaggttccgaagatagttggcaaatctgccaattcgggtggcattcccaccttccactcctatgaggctagctgcaaaagagaggaaggcaaaaggtgatgatggggcgtatgctggccaggaaag

SEQ ID NO: 1284 - DNA, 80 bp, Artificial Sequence
  Description of Artificial Sequence: Synthetic oligonucleotide
  Description of Combined DNA/RNA Molecule: Synthetic oligonucleotide
gccgtctugccatggcagggacgauaacggtacaaggctaaagcuutgctaacggucgagctttccuggccagcatacgc

SEQ ID NO: 1285 - DNA, 20 bp, Artificial Sequence
  Description of Artificial Sequence: Synthetic primer
gaaatttgtctgcgaagttt

SEQ ID NO: 1286 - DNA, 20 bp, Artificial Sequence
  Description of Artificial Sequence: Synthetic primer
ctattttcagttgtatcatg

SEQ ID NO: 1287 - DNA, 196 bp, Artificial Sequence
  Description of Artificial Sequence: Synthetic polynucleotide
aaacttcgcagacaaatttcaggaaggatactattactcttgaggtctctgtggatgattgacttggcgtgtaagtaactgaaaaacaaaacatcattttaacctgagtagggctaaaggactctggcctcgaaatctacagaacatacttgggggtgtaaagacttatttagaatcatgatacaactgaaaatag

SEQ ID NO: 1288 - DNA, 80 bp, Artificial Sequence
  Description of Artificial Sequence: Synthetic oligonucleotide
  Description of Combined DNA/RNA Molecule: Synthetic oligonucleotide
gaaatttguctgcgaagtttacgauaacggtacaaggctaaagcuutgctaacggucgagctattttcagutgtatcatg

SEQ ID NO: 1289 - DNA, 20 bp, Artificial Sequence
  Description of Artificial Sequence: Synthetic primer
ctttaggattaagagagcaa

SEQ ID NO: 1290 - DNA, 20 bp, Artificial Sequence
  Description of Artificial Sequence: Synthetic primer
cagcattcttcagggccagc

SEQ ID NO: 1291 - DNA, 196 bp, Artificial Sequence
  Description of Artificial Sequence: Synthetic polynucleotide
cagcattcttcagggccagccatatttttctgtggactctaaaacaggtatctgatacaagggtcgagtcagaggtgtttattccctgataatttataactgctgctatgacagacccaactctcctttttaaggactctccagggagtgtattaaccagagaagactgctcttagctttaggattaagagagcaa

SEQ ID NO: 1292 - DNA, 80 bp, Artificial Sequence
  Description of Artificial Sequence: Synthetic oligonucleotide
  Description of Combined DNA/RNA Molecule: Synthetic oligonucleotide
ctttaggatuaagagagcaaacgauaacggtacaaggctaaagcuutgctaacggucgagcagcattctucagggccagc

SEQ ID NO: 1293 - DNA, 20 bp, Artificial Sequence
  Description of Artificial Sequence: Synthetic primer
acagatgtgaaaacagaggc

SEQ ID NO: 1294 - DNA, 20 bp, Artificial Sequence
  Description of Artificial Sequence: Synthetic primer
ctgtcgatttggaaagctgg

SEQ ID NO: 1295 - DNA, 196 bp, Artificial Sequence
  Description of Artificial Sequence: Synthetic polynucleotide
gcctctgttttcacatctgtagagtgggaacagtaacacctacctatcaggacagctgtaagggtgccagctgtaaatggggcaggggtgtgttaaggctgactgcccatgggggctctgtttgccgacttgctttgtctttccttccagccccttcatgaataagttttttccagccagctttccaaatcgacag

SEQ ID NO: 1296 - DNA, 80 bp, Artificial Sequence
  Description of Artificial Sequence: Synthetic oligonucleotide
  Description of Combined DNA/RNA Molecule: Synthetic oligonucleotide
acagatgugaaaacagaggcacgauaacggtacaaggctaaagcuutgctaacggucgagctgtcgattuggaaagctgg

SEQ ID NO: 1297 - DNA, 20 bp, Artificial Sequence
  Description of Artificial Sequence: Synthetic primer
gggttccgtctctgactgtc

SEQ ID NO: 1298 - DNA, 20 bp, Artificial Sequence
  Description of Artificial Sequence: Synthetic primer
cttctacgacgccaccagga

SEQ ID NO: 1299 - DNA, 196 bp, Artificial Sequence
  Description of Artificial Sequence: Synthetic polynucleotide
gacagtcagagacggaaccctcgcccctcttgagagagctcatgggctttgggggccccaataccaaaaggtgctggaggaaggcagtggtggcagggacccaagttagggctgcgcaccacggcgcatgctactcagaggttgcactaccttcagctgtccctcaaaccaacggttcctggtggcgtcgtagaag

SEQ ID NO: 1300 - DNA, 80 bp, Artificial Sequence
  Description of Artificial Sequence: Synthetic oligonucleotide
  Description of Combined DNA/RNA Molecule: Synthetic oligonucleotide
gggttccguctctgactgtcacgauaacggtacaaggctaaagcuutgctaacggucgagcttcuacgacgccaccagga

SEQ ID NO: 1301 - DNA, 20 bp, Artificial Sequence
  Description of Artificial Sequence: Synthetic primer
ctgtaagttctcaatagccc

SEQ ID NO: 1302 - DNA, 20 bp, Artificial Sequence
  Description of Artificial Sequence: Synthetic primer
ctggataacctcctccagct

SEQ ID NO: 1303 - DNA, 197 bp, Artificial Sequence
  Description of Artificial Sequence: Synthetic polynucleotide
ctggataacctcctccagctcggacagcatgtggcaagaaaccatggcctgatggaagcaaatcgcattccaaactaattactgcacgaacaatccaaaagacaggattaatttaaatcattccttctggtgtcagggtatctgccgatcagagaaaacaggcatgtttccagcagcctgtaagttctcaatagccc

SEQ ID NO: 1304 - DNA, 80 bp, Artificial Sequence
  Description of Artificial Sequence: Synthetic oligonucleotide
  Description of Combined DNA/RNA Molecule: Synthetic oligonucleotide
ctgtaagtuctcaatagcccacgauaacggtacaaggctaaagcuutgctaacggucgagctggataaccucctccagct

SEQ ID NO: 1305 - DNA, 20 bp, Artificial Sequence
  Description of Artificial Sequence: Synthetic primer
gccaggaagagaatgccggg

SEQ ID NO: 1306 - DNA, 20 bp, Artificial Sequence
  Description of Artificial Sequence: Synthetic primer
cgatgatcatacagccagcc

SEQ ID NO: 1307 - DNA, 197 bp, Artificial Sequence
  Description of Artificial Sequence: Synthetic polynucleotide
cccggcattctcttcctggctgtggaaggtgactgtgtaggcacagacagtaatgcagatggcttggtcactgacatctggagacagactgagaaaagacttcataacgtatcactcatctcccattctgtttctgcttcttgttcctaggcagtgctttggtgatgggctacactgggctggctgtatgatcatcg

SEQ ID NO: 1308 - DNA, 80 bp, Artificial Sequence
  Description of Artificial Sequence: Synthetic oligonucleotide
  Description of Combined DNA/RNA Molecule: Synthetic oligonucleotide
gccaggaagagaaugccgggacgauaacggtacaaggctaaagcuutgctaacggucgagcgatgatcauacagccagcc

SEQ ID NO: 1309 - DNA, 20 bp, Artificial Sequence
  Description of Artificial Sequence: Synthetic primer
atcaaaggttcatttatgta

SEQ ID NO: 1310 - DNA, 20 bp, Artificial Sequence
  Description of Artificial Sequence: Synthetic primer
ctaaacagaaagaagttgag

SEQ ID NO: 1311 - DNA, 197 bp, Artificial Sequence
  Description of Artificial Sequence: Synthetic polynucleotide
ctaaacagaaagaagttgagcaacaagaaaatacttgcccttcattttgcccttttttgctgtgaaaatccatcagaaagagaaagcagggaaacaaaaaaaaaagagggtaaagcaaagggggtcataaacaatattttattcaatgactttcttgaataaaaatattgtgcatagatcaaaggttcatttatgta

SEQ ID NO: 1312 - DNA, 80 bp, Artificial Sequence
  Description of Artificial Sequence: Synthetic oligonucleotide
  Description of Combined DNA/RNA Molecule: Synthetic oligonucleotide
atcaaaggtucatttatgtaacgauaacggtacaaggctaaagcuutgctaacggucgagctaaacagaaagaagutgag

SEQ ID NO: 1313 - DNA, 20 bp, Artificial Sequence
  Description of Artificial Sequence: Synthetic primer
gcggatcacaaggtcgggag

SEQ ID NO: 1314 - DNA, 20 bp, Artificial Sequence
  Description of Artificial Sequence: Synthetic primer
ctccgcgtccgtcttctggg

SEQ ID NO: 1315 - DNA, 198 bp, Artificial Sequence
  Description of Artificial Sequence: Synthetic polynucleotide
ctcccgaccttgtgatccgcccgccttggcctcctgcatttcttattttcacacgtgtgactttggggtggattctcatggtggatcccgggatggggggagctgggtgggggcgctggtttctcacggggccgtgcccgccttgtgcaggtggtcacgggctcgggccgccaggaggcccagaagacggacgcggag

SEQ ID NO: 1316 - DNA, 80 bp, Artificial Sequence
  Description of Artificial Sequence: Synthetic oligonucleotide
  Description of Combined DNA/RNA Molecule: Synthetic oligonucleotide
gcggaucacaaggtcgggagacgauaacggtacaaggctaaagcuutgctaacggucgagctccgcguccgtcttctggg

SEQ ID NO: 1317 - DNA, 20 bp, Artificial Sequence
  Description of Artificial Sequence: Synthetic primer
tattcaggcaatgaagccat

SEQ ID NO: 1318 - DNA, 20 bp, Artificial Sequence
  Description of Artificial Sequence: Synthetic primer
catccaaggagctgcatctc

SEQ ID NO: 1319 - DNA, 198 bp, Artificial Sequence
  Description of Artificial Sequence: Synthetic polynucleotide
atggcttcattgcctgaatataaaagtcatcataatttttctttgtttcttttttaacctatcaaacctttcttagtcccaccatactactgttatctacaaatcctcccatattctcaatatataaataagtagtatttaacaactcacacatccaccagaataagcatgtctttaggagatgcagctccttggatg

SEQ ID NO: 1320 - DNA, 80 bp, Artificial Sequence
  Description of Artificial Sequence: Synthetic oligonucleotide
  Description of Combined DNA/RNA Molecule: Synthetic oligonucleotide
tattcaggcaaugaagccatacgauaacggtacaaggctaaagcuutgctaacggucgagcatccaaggagcugcatctc

SEQ ID NO: 1321 - DNA, 20 bp, Artificial Sequence
  Description of Artificial Sequence: Synthetic primer
ctcgctgctactgcgccgac

SEQ ID NO: 1322 - DNA, 20 bp, Artificial Sequence
  Description of Artificial Sequence: Synthetic primer
cgcgcggcggatggtttcca

SEQ ID NO: 1323 - DNA, 198 bp, Artificial Sequence
  Description of Artificial Sequence: Synthetic polynucleotide
gtcggcgcagtagcagcgagcagcagagtccgcacgctccggcgaggggcagaagagcgcgagggagcgcggggcagcagaagcgagagccgagcgcggacccagccaggacccacagccctccccagctgcccaggaagagccccagccatggaacaccagctcctgtgctgcgaagtggaaaccatccgccgcgcg

SEQ ID NO: 1324 - DNA, 80 bp, Artificial Sequence
  Description of Artificial Sequence: Synthetic oligonucleotide
  Description of Combined DNA/RNA Molecule: Synthetic oligonucleotide
ctcgctgcuactgcgccgacacgauaacggtacaaggctaaagcuutgctaacggucgagcgcgcggcggauggtttcca

SEQ ID NO: 1325 - DNA, 20 bp, Artificial Sequence
  Description of Artificial Sequence: Synthetic primer
ggcctagagtgatgggcagg

SEQ ID NO: 1326 - DNA, 20 bp, Artificial Sequence
  Description of Artificial Sequence: Synthetic primer
ccacaacgctttgtaacggc

SEQ ID NO: 1327 - DNA, 198 bp, Artificial Sequence
  Description of Artificial Sequence: Synthetic polynucleotide
ccacaacgctttgtaacggctgcgtaaacgtcggtgcttgagttgtcatctttctaggcactctgaaaaagaagagaaaataaattagggtgtcccagctaagggtcactctggagctgctttgcagatagcagagacacacgtttctccaaatggattgctccataggtcatctgtgggcctagagtgatgggcagg

SEQ ID NO: 1328 - DNA, 80 bp, Artificial Sequence
  Description of Artificial Sequence: Synthetic oligonucleotide
  Description of Combined DNA/RNA Molecule: Synthetic oligonucleotide
ggcctagagugatgggcaggacgauaacggtacaaggctaaagcuutgctaacggucgagccacaacgcuttgtaacggc

SEQ ID NO: 1329 - DNA, 20 bp, Artificial Sequence
  Description of Artificial Sequence: Synthetic primer
tgattttgaaaaggaatcac

SEQ ID NO: 1330 - DNA, 20 bp, Artificial Sequence
  Description of Artificial Sequence: Synthetic primer
ctccagaaagcatgtctgct

SEQ ID NO: 1331 - DNA, 198 bp, Artificial Sequence
  Description of Artificial Sequence: Synthetic polynucleotide
gtgattccttttcaaaatcattgtcatagattacacctactgtatctcgttgacaaagggtataatgtgaatcatcatttctcccttcatgtggatcaaacgctgtttcctttacctcgatgggcctgtcacttcgtgctgtctcttgaggtagcttagcaattattgctttttctctagcagacatgctttctggag

SEQ ID NO: 1332 - DNA, 80 bp, Artificial Sequence
  Description of Artificial Sequence: Synthetic oligonucleotide
  Description of Combined DNA/RNA Molecule: Synthetic oligonucleotide
tgatttugaaaaggaatcacacgauaacggtacaaggctaaagcuutgctaacggucgagctccagaaagcaugtctgct

SEQ ID NO: 1333 - DNA, 20 bp, Artificial Sequence
  Description of Artificial Sequence: Synthetic primer
ggaataagaggagagaaagt

SEQ ID NO: 1334 - DNA, 20 bp, Artificial Sequence
  Description of Artificial Sequence: Synthetic primer
caaactggtggtggttggag

SEQ ID NO: 1335 - DNA, 198 bp, Artificial Sequence
  Description of Artificial Sequence: Synthetic polynucleotide
actttctctcctcttattcctttaatacagaatatgggtaaagatgatccgacaagtgagagacaggatcaggtcagcgggctaccactgggcctcacctctatggtgggatcatattcatctacaaagtggttctggattagctggattgtcagtgcgcttttcccaacaccacctgctccaaccaccaccagtttg

SEQ ID NO: 1336 - DNA, 80 bp, Artificial Sequence
  Description of Artificial Sequence: Synthetic oligonucleotide
  Description of Combined DNA/RNA Molecule: Synthetic oligonucleotide
ggaauaagaggagagaaagtacgauaacggtacaaggctaaagcuutgctaacggucgagcaaactgguggtggttggag

SEQ ID NO: 1337 - DNA, 20 bp, Artificial Sequence
  Description of Artificial Sequence: Synthetic primer
tgggtgaactctgcaggcac

SEQ ID NO: 1338 - DNA, 20 bp, Artificial Sequence
  Description of Artificial Sequence: Synthetic primer
cctattgcactcctccacta

SEQ ID NO: 1339 - DNA, 198 bp, Artificial Sequence
  Description of Artificial Sequence: Synthetic polynucleotide
gtgcctgcagagttcacccatgcagggcagggagggctgattgaagagcccacaggtgatgagctaccaaccaagaaggggcggaggaaccgtttcaagtggggcccagcatcccagcagatcctgttccaggcctatgagaggcagaagaaccctagcaaggaggagcgagagacgctagtggaggagtgcaatagg

SEQ ID NO: 1340 - DNA, 80 bp, Artificial Sequence
  Description of Artificial Sequence: Synthetic oligonucleotide
  Description of Combined DNA/RNA Molecule: Synthetic oligonucleotide
tgggtgaacuctgcaggcacacgauaacggtacaaggctaaagcuutgctaacggucgagcctattgcacucctccacta

SEQ ID NO: 1341 - DNA, 20 bp, Artificial Sequence
  Description of Artificial Sequence: Synthetic primer
catgtataagtcaaaatgat

SEQ ID NO: 1342 - DNA, 20 bp, Artificial Sequence
  Description of Artificial Sequence: Synthetic primer
ctggccaagcagatgtgtat

SEQ ID NO: 1343 - DNA, 199 bp, Artificial Sequence
  Description of Artificial Sequence: Synthetic polynucleotide
ctggccaagcagatgtgtatgatcatgatggaaatgacagacttcacaaggtgaggcccagagccagggagctgaagattttttcattaaacccagaagtgtagcagtgtgtattagcatgtgaaagcctgctgaaaaattaaaatataccaacgcaaggtggtggtattataaatttacatgtataagtcaaaatgat

SEQ ID NO: 1344 - DNA, 80 bp, Artificial Sequence
  Description of Artificial Sequence: Synthetic oligonucleotide
  Description of Combined DNA/RNA Molecule: Synthetic oligonucleotide
catgtataagucaaaatgatacgauaacggtacaaggctaaagcuutgctaacggucgagctggccaagcagaugtgtat

SEQ ID NO: 1345 - DNA, 20 bp, Artificial Sequence
  Description of Artificial Sequence: Synthetic primer
ggaagcttaggttcttgatc

SEQ ID NO: 1346 - DNA, 20 bp, Artificial Sequence
  Description of Artificial Sequence: Synthetic primer
catgcgactgagacagctca

SEQ ID NO: 1347 - DNA, 199 bp, Artificial Sequence
  Description of Artificial Sequence: Synthetic polynucleotide
gatcaagaacctaagcttccaagtattcactcatcttattgtaaatacaaacttggctagaattattttaaataaaaacttattgaacttaggaggggaaaaaacctatccttaattgtatattcattttcacaaaagataaaattatacctttacttcatcagctcgtctgaacctcttgagctgtctcagtcgcatg

SEQ ID NO: 1348 - DNA, 80 bp, Artificial Sequence
  Description of Artificial Sequence: Synthetic oligonucleotide
  Description of Combined DNA/RNA Molecule: Synthetic oligonucleotide
ggaagctuaggttcttgatcacgauaacggtacaaggctaaagcuutgctaacggucgagcatgcgacugagacagctca

SEQ ID NO: 1349 - DNA, 20 bp, Artificial Sequence
  Description of Artificial Sequence: Synthetic primer
agcagacaccagcaaagctc

SEQ ID NO: 1350 - DNA, 20 bp, Artificial Sequence
  Description of Artificial Sequence: Synthetic primer
catctccaggtcctgagcta

SEQ ID NO: 1351 - DNA, 199 bp, Artificial Sequence
  Description of Artificial Sequence: Synthetic polynucleotide
gagctttgctggtgtctgctgtggcttttgtcttctggcagcgacgtggctctagaggaatggcagggtcagaatgcttgatttggtgcccacccgctctccacccatctcacttagctccaatgacagtgtcttccgttctccccacagggatgaagctgaaatggaatatctgaagatagctcaggacctggagatg

SEQ ID NO: 1352 - DNA, 80 bp, Artificial Sequence
  Description of Artificial Sequence: Synthetic oligonucleotide
  Description of Combined DNA/RNA Molecule: Synthetic oligonucleotide
agcagacaccagcaaagcucacgauaacggtacaaggctaaagcuutgctaacggucgagcatctccaggucctgagcta

SEQ ID NO: 1353 - DNA, 20 bp, Artificial Sequence
  Description of Artificial Sequence: Synthetic primer
tctgtggcacgcatttcgta

SEQ ID NO: 1354 - DNA, 20 bp, Artificial Sequence
  Description of Artificial Sequence: Synthetic primer
caaacactgaacgccctgat

SEQ ID NO: 1355 - DNA, 199 bp, Artificial Sequence
  Description of Artificial Sequence: Synthetic polynucleotide
caaacactgaacgccctgatacacctacaaacacgccaaatgcacctggaaggaaaagttggggaaagggaaaatggaagtcaaagaaatgcaaatattctttcaaatgtgtaaatagtctcaaggtatgtgcaaaaaaagatcctttgggctgaatgctaggcttcagaaattatttctctgtggcacgcatttcgta

SEQ ID NO: 1356 - DNA, 80 bp, Artificial Sequence
  Description of Artificial Sequence: Synthetic oligonucleotide
  Description of Combined DNA/RNA Molecule: Synthetic oligonucleotide
tctgtggcacgcauttcgtaacgauaacggtacaaggctaaagcuutgctaacggucgagcaaacacugaacgccctgat

SEQ ID NO: 1357 - DNA, 20 bp, Artificial Sequence
  Description of Artificial Sequence: Synthetic primer
caatctgattgatattttat

SEQ ID NO: 1358 - DNA, 20 bp, Artificial Sequence
  Description of Artificial Sequence: Synthetic primer
cccaggcggtgcaacgacat

SEQ ID NO: 1359 - DNA, 200 bp, Artificial Sequence
  Description of Artificial Sequence: Synthetic polynucleotide
cccaggcggtgcaacgacatgatgaacgtggggcggctgcaaggattcgacgtaatgcggctcttgttttttaagagagctcctctgccttcatctctttcttttgtcttggattatttctctccacatagagaaagctgatccttttcacttggttttctggcttctctcactttacctcaatctgattgatattttat

SEQ ID NO: 1360 - DNA, 80 bp, Artificial Sequence
  Description of Artificial Sequence: Synthetic oligonucleotide
  Description of Combined DNA/RNA Molecule: Synthetic oligonucleotide
caatctgatugatattttatacgauaacggtacaaggctaaagcuutgctaacggucgagcccaggcggugcaacgacat

SEQ ID NO: 1361 - DNA, 20 bp, Artificial Sequence
  Description of Artificial Sequence: Synthetic primer
tcaattcctcatcagaagta

SEQ ID NO: 1362 - DNA, 20 bp, Artificial Sequence
  Description of Artificial Sequence: Synthetic primer
ctttgaagagcagttgctga

SEQ ID NO: 1363 - DNA, 200 bp, Artificial Sequence
  Description of Artificial Sequence: Synthetic polynucleotide
ctttgaagagcagttgctgatcacgatgggaaaagaacctactctccagaaccatctctaggcaactatcaaaaagaagcagaagttcaagtggacaaatttatgtgaaaattcatttaacatataagctgaactctattatggggaatggatacaaaagcagagctcccatcttgactttcaattcctcatcagaagta

SEQ ID NO: 1364 - DNA, 80 bp, Artificial Sequence
  Description of Artificial Sequence: Synthetic oligonucleotide
  Description of Combined DNA/RNA Molecule: Synthetic oligonucleotide
tcaattccucatcagaagtaacgauaacggtacaaggctaaagcuutgctaacggucgagctttgaagagcagutgctga

SEQ ID NO: 1365 - DNA, 20 bp, Artificial Sequence
  Description of Artificial Sequence: Synthetic primer
ttagataaagagccaactaa

SEQ ID NO: 1366 - DNA, 20 bp, Artificial Sequence
  Description of Artificial Sequence: Synthetic primer
cattcaggaggaagtgcgcc

SEQ ID NO: 1367 - DNA, 200 bp, Artificial Sequence
  Description of Artificial Sequence: Synthetic polynucleotide
cattcaggaggaagtgcgcctgggagctgctgttcggtgagttctttatatctgacattaaccaagaaaaatttaagtaaacatgaaacaaaaatcacttttttgaaaacagtttctaaaaggtttccatgtgttacttttgatgtttatcttgcctaaaacataaaggaatggctctatttagataaagagccaactaa

SEQ ID NO: 1368 - DNA, 80 bp, Artificial Sequence
  Description of Artificial Sequence: Synthetic oligonucleotide
  Description of Combined DNA/RNA Molecule: Synthetic oligonucleotide
ttagauaaagagccaactaaacgauaacggtacaaggctaaagcuutgctaacggucgagcattcaggaggaagugcgcc

SEQ ID NO: 1369 - DNA, 20 bp, Artificial Sequence
  Description of Artificial Sequence: Synthetic primer
caatgtttttcatcctagta

SEQ ID NO: 1370 - DNA, 20 bp, Artificial Sequence
  Description of Artificial Sequence: Synthetic primer
cttcttgggcagcagcggcg

SEQ ID NO: 1371 - DNA, 200 bp, Artificial Sequence
  Description of Artificial Sequence: Synthetic polynucleotide
cttcttgggcagcagcggcgttttgctgtgctggatttctgctaccatctacttaaagtccagaaacatgatggcaaagatgagattattaaaaatgtggtatgtggatgaaaatctcgcaccatctatggaccttttgcaaaagcatactttctttgtgttataagttcttgtttctggcaatgtttttcatcctagta

SEQ ID NO: 1372 - DNA, 80 bp, Artificial Sequence
  Description of Artificial Sequence: Synthetic oligonucleotide
  Description of Combined DNA/RNA Molecule: Synthetic oligonucleotide
caatgttttucatcctagtaacgauaacggtacaaggctaaagcuutgctaacggucgagcttctugggcagcagcggcg

SEQ ID NO: 1373 - DNA, 20 bp, Artificial Sequence
  Description of Artificial Sequence: Synthetic primer
tcctcaggaccccggctgac

SEQ ID NO: 1374 - DNA, 20 bp, Artificial Sequence
  Description of Artificial Sequence: Synthetic primer
ctcacaagtagcttattata

SEQ ID NO: 1375 - DNA, 201 bp, Artificial Sequence
  Description of Artificial Sequence: Synthetic polynucleotide
gtcagccggggtcctgaggacatccacagctccttcccccacacacatcttggggacccctggccccttggggagggcctgagcacaggggtggggccggcatcccctcctccctcgttctcacatctgtcttcccttctcttgctctagccttactaaagatcacaggaagagaccaaagtataataagctacttgtgag

SEQ ID NO: 1376 - DNA, 80 bp, Artificial Sequence
  Description of Artificial Sequence: Synthetic oligonucleotide
  Description of Combined DNA/RNA Molecule: Synthetic oligonucleotide
tcctcaggaccccggcugacacgauaacggtacaaggctaaagcuutgctaacggucgagctcacaaguagcttattata

SEQ ID NO: 1377 - DNA, 20 bp, Artificial Sequence
  Description of Artificial Sequence: Synthetic primer
ccagaacgtctctggcatag

SEQ ID NO: 1378 - DNA, 20 bp, Artificial Sequence
  Description of Artificial Sequence: Synthetic primer
ccatcttctttaatgactac

SEQ ID NO: 1379 - DNA, 201 bp, Artificial Sequence
  Description of Artificial Sequence: Synthetic polynucleotide
ccatcttctttaatgactactttatgggtatagtcattgacaatttgctggcctgtgaaaatatgtttaaaagaaagtagattttaaaatagtttttaaaaattgttagatgcatacataagcttgtttttgtgtttttatgattcatgagcaaaaacttatcacgcttaccatcatgaaaccagaacgtctctggcatag

SEQ ID NO: 1380 - DNA, 80 bp, Artificial Sequence
  Description of Artificial Sequence: Synthetic oligonucleotide
  Description of Combined DNA/RNA Molecule: Synthetic oligonucleotide
ccagaacguctctggcatagacgauaacggtacaaggctaaagcuutgctaacggucgagccatcttctutaatgactac

SEQ ID NO: 1381 - DNA, 20 bp, Artificial Sequence
  Description of Artificial Sequence: Synthetic primer
aagatgtagacgtaggggta

SEQ ID NO: 1382 - DNA, 20 bp, Artificial Sequence
  Description of Artificial Sequence: Synthetic primer
ccaaccatttttgcatatgg

SEQ ID NO: 1383 - DNA, 201 bp, Artificial Sequence
  Description of Artificial Sequence: Synthetic polynucleotide
ccaaccatttttgcatatggatccattggagatggtggtcgtgagttagaggacccaggtgaaaacacttgcggtgagggtggctgagaagtctgagcctgagaaagactatcctggatgggaatccgggatggggctggaggaggaggtggagcttgtggctttacaaacacatcatctgaagatgtagacgtaggggta

SEQ ID NO: 1384 - DNA, 80 bp, Artificial Sequence
  Description of Artificial Sequence: Synthetic oligonucleotide
  Description of Combined DNA/RNA Molecule: Synthetic oligonucleotide
aagatguagacgtaggggtaacgauaacggtacaaggctaaagcuutgctaacggucgagccaaccattuttgcatatgg

SEQ ID NO: 1385 - DNA, 20 bp, Artificial Sequence
  Description of Artificial Sequence: Synthetic primer
gctgctctaccaggtgggtg

SEQ ID NO: 1386 - DNA, 20 bp, Artificial Sequence
  Description of Artificial Sequence: Synthetic primer
cccaacctcgaagcttgttg

SEQ ID NO: 1387 - DNA, 201 bp, Artificial Sequence
  Description of Artificial Sequence: Synthetic polynucleotide
cccaacctcgaagcttgttgggtgtcccctccttctcctcacagaacaggggtccttatgtgttgttccagcccaggatggcggcccaggtgactctggaggacgcgctgtccaacgtggacctcctggaggagctgcccctgcccgaccagcagccctgcatcgagcccccgccatcctcgctgctctaccaggtgggtg

SEQ ID NO: 1388 - DNA, 80 bp, Artificial Sequence
  Description of Artificial Sequence: Synthetic oligonucleotide
  Description of Combined DNA/RNA Molecule: Synthetic oligonucleotide
gctgctcuaccaggtgggtgacgauaacggtacaaggctaaagcuutgctaacggucgagcccaaccucgaagcttgttg

SEQ ID NO: 1389 - DNA, 20 bp, Artificial Sequence
  Description of Artificial Sequence: Synthetic primer
atcaagctaggagggcagag

SEQ ID NO: 1390 - DNA, 20 bp, Artificial Sequence
  Description of Artificial Sequence: Synthetic primer
cacgcgcagctggtgagcca

SEQ ID NO: 1391 - DNA, 201 bp, Artificial Sequence
  Description of Artificial Sequence: Synthetic polynucleotide
ctctgccctcctagcttgatgagacccagaaggtaggctggactcctgtccccaggcactgagcactggcacagagcagagggtccccaggggcagttcgggggcagaaggaacaggcgagatgatcctctctcttcccccaatccccagatgcccatcaatgcctccaatgcgctgaccctggctcaccagctgcgcgtg

SEQ ID NO: 1392 - DNA, 80 bp, Artificial Sequence
  Description of Artificial Sequence: Synthetic oligonucleotide
  Description of Combined DNA/RNA Molecule: Synthetic oligonucleotide
atcaagcuaggagggcagagacgauaacggtacaaggctaaagcuutgctaacggucgagcacgcgcagcuggtgagcca

SEQ ID NO: 1393 - DNA, 20 bp, Artificial Sequence
  Description of Artificial Sequence: Synthetic primer
accctactgccaacttagta

SEQ ID NO: 1394 - DNA, 20 bp, Artificial Sequence
  Description of Artificial Sequence: Synthetic primer
caaatctagctacaattgcg

SEQ ID NO: 1395 - DNA, 201 bp, Artificial Sequence
  Description of Artificial Sequence: Synthetic polynucleotide
caaatctagctacaattgcgcctttctttctttcctcaaacagtaaaacttccaggtctcaggacttatgttgacccacatacatatgaagaccctacccaagctgttcatgagtttgccaaggaattggatgccaccaacatatccattgataaagttgttggagcaggtaaccacaatgaccctactgccaacttagta

SEQ ID NO: 1396 - DNA, 80 bp, Artificial Sequence
  Description of Artificial Sequence: Synthetic oligonucleotide
  Description of Combined DNA/RNA Molecule: Synthetic oligonucleotide
accctacugccaacttagtaacgauaacggtacaaggctaaagcuutgctaacggucgagcaaatctagcuacaattgcg

SEQ ID NO: 1397 - DNA, 20 bp, Artificial Sequence
  Description of Artificial Sequence: Synthetic primer
acagatcctcacaatccctc

SEQ ID NO: 1398 - DNA, 20 bp, Artificial Sequence
  Description of Artificial Sequence: Synthetic primer
ctctacaaagacgagcagca

SEQ ID NO: 1399 - DNA, 201 bp, Artificial Sequence
  Description of Artificial Sequence: Synthetic polynucleotide
gagggattgtgaggatctgtgaaggaatctgtgtaattgctgagagcgtctcatctaggaagtgctgggtgcccgctgcggttaggaagatgctctctggtgcacagggccttgttggcagtgatgtgatggttttatctcttctgccagttccgcctggtggtgaagacagccctgaagctgctgctcgtctttgtagag

SEQ ID NO: 1400 - DNA, 80 bp, Artificial Sequence
  Description of Artificial Sequence: Synthetic oligonucleotide
  Description of Combined DNA/RNA Molecule: Synthetic oligonucleotide
acagatccucacaatccctcacgauaacggtacaaggctaaagcuutgctaacggucgagctcuacaaagacgagcagca

SEQ ID NO: 1401 - DNA, 20 bp, Artificial Sequence
  Description of Artificial Sequence: Synthetic primer
gagttccactgcaaggtgta

SEQ ID NO: 1402 - DNA, 20 bp, Artificial Sequence
  Description of Artificial Sequence: Synthetic primer
cacgctggacgtgctgggtg

SEQ ID NO: 1403 - DNA, 202 bp, Artificial Sequence
  Description of Artificial Sequence: Synthetic polynucleotide
cacgctggacgtgctgggtgagggccctggggcggcgcgggggtgggggcggcagtggcggtggtggtgagggagggggtggcccctgagcgtcatctgcccccacagagcgctccccgcaccggcccatcctgcaggcggggctgccggccaaccagacggcggtgctgggcagcgacgtggagttccactgcaaggtgta

SEQ ID NO: 1404 - DNA, 80 bp, Artificial Sequence
  Description of Artificial Sequence: Synthetic oligonucleotide
  Description of Combined DNA/RNA Molecule: Synthetic oligonucleotide
gagttccacugcaaggtgtaacgauaacggtacaaggctaaagcuutgctaacggucgagcacgctggacgugctgggtg

SEQ ID NO: 1405 - DNA, 20 bp, Artificial Sequence
  Description of Artificial Sequence: Synthetic primer
cctcacaggggtagtgggga

SEQ ID NO: 1406 - DNA, 20 bp, Artificial Sequence
  Description of Artificial Sequence: Synthetic primer
cgtcgtcagcaagacgttga

SEQ ID NO: 1407 - DNA, 202 bp, Artificial Sequence
  Description of Artificial Sequence: Synthetic polynucleotide
tccccactacccctgtgaggacgagccctcccgccgtgtcactgggcagttgcagggggtgcctgtgcccctcttgccacctggccacccggctccaaaagccgagctgtgcatcctgcttcccttgcagggatccccagcagcaagacgggcctttgtcccccagctccggagtgggaagttcaacgtcttgctgacgacg

SEQ ID NO: 1408 - DNA, 80 bp, Artificial Sequence
  Description of Artificial Sequence: Synthetic oligonucleotide
  Description of Combined DNA/RNA Molecule: Synthetic oligonucleotide
cctcacagggguagtggggaacgauaacggtacaaggctaaagcuutgctaacggucgagcgtcgucagcaagacgttga

SEQ ID NO: 1409 - DNA, 20 bp, Artificial Sequence
  Description of Artificial Sequence: Synthetic primer
tcctcttgctttggcctcct

SEQ ID NO: 1410 - DNA, 20 bp, Artificial Sequence
  Description of Artificial Sequence: Synthetic primer
cctctaattctgatgtatcc

SEQ ID NO: 1411 - DNA, 202 bp, Artificial Sequence
  Description of Artificial Sequence: Synthetic polynucleotide
aggaggccaaagcaagaggatcacttgaggccaggagttcaagaccagcttgagtaacatagtgagaccctgtctcttaaaaaaaaaaataaaaggtcagctgctgttgtctttgtcaccattatcatgtcctctccatttcccttgcaggacttcctcaagtattccaaaaaggccagcctggatacatcagaattagagg

SEQ ID NO: 1412 - DNA, 80 bp, Artificial Sequence
  Description of Artificial Sequence: Synthetic oligonucleotide
  Description of Combined DNA/RNA Molecule: Synthetic oligonucleotide
tcctcttgcuttggcctcctacgauaacggtacaaggctaaagcuutgctaacggucgagcctctaatuctgatgtatcc

SEQ ID NO: 1413 - DNA, 20 bp, Artificial Sequence
  Description of Artificial Sequence: Synthetic primer
ggcacaggcctggggactgc

SEQ ID NO: 1414 - DNA, 20 bp, Artificial Sequence
  Description of Artificial Sequence: Synthetic primer
cggggagccccccagcgtga

SEQ ID NO: 1415 - DNA, 202 bp, Artificial Sequence
  Description of Artificial Sequence: Synthetic polynucleotide
gcagtccccaggcctgtgccctggagctcctgggtgtggtttctacccctccctgggggcagcagcgcagccctggcctattcccctggtgcccgcccaggtgtctgtcctgggagtctcaggacagcctgacctcaccttcccctgcagctggtcctttggggtcctgctctgggagatcttcacgctggggggctccccg

SEQ ID NO: 1416 - DNA, 80 bp, Artificial Sequence
  Description of Artificial Sequence: Synthetic oligonucleotide
  Description of Combined DNA/RNA Molecule: Synthetic oligonucleotide
ggcacaggccuggggactgcacgauaacggtacaaggctaaagcuutgctaacggucgagcggggagccccccagcguga

SEQ ID NO: 1417 - DNA, 20 bp, Artificial Sequence
  Description of Artificial Sequence: Synthetic primer
taaaagagcctttcaaactc

SEQ ID NO: 1418 - DNA, 20 bp, Artificial Sequence
  Description of Artificial Sequence: Synthetic primer
cctcacaggtttcctttctc

SEQ ID NO: 1419 - DNA, 203 bp, Artificial Sequence
  Description of Artificial Sequence: Synthetic polynucleotide
cctcacaggtttcctttctcgaagcaagtcttccagactacgttcacaatgttcagccacgaccactagtcgttctgagaaaaacaaagcaaacccatgttatattttatcaatacaacatgttaaaaacaaaataatactctccactgatgatattaatatataacacccataacaatattttaaaagagcctttcaaactc

SEQ ID NO: 1420 - DNA, 80 bp, Artificial Sequence
  Description of Artificial Sequence: Synthetic oligonucleotide
  Description of Combined DNA/RNA Molecule: Synthetic oligonucleotide
taaaagagccuttcaaactcacgauaacggtacaaggctaaagcuutgctaacggucgagcctcacagguttcctttctc

SEQ ID NO: 1421 - DNA, 20 bp, Artificial Sequence
  Description of Artificial Sequence: Synthetic primer
aaacttagatcatcagtcac

SEQ ID NO: 1422 - DNA, 20 bp, Artificial Sequence
  Description of Artificial Sequence: Synthetic primer
catgcacgtgaagccattgc

SEQ ID NO: 1423 - DNA, 203 bp, Artificial Sequence
  Description of Artificial Sequence: Synthetic polynucleotide
gtgactgatgatctaagtttcccgaggtttctcagagcctctctggttctttcaatcggggatgtctgcagagggcagaaagaaaacaggcgttagaaacctgaggtcaaagatgtgtggcacatcccgccctcctctcttgccgtccctaccggcattgaaatacttatggataaagttctcgcaatggcttcacgtgcatg

SEQ ID NO: 1424 - DNA, 80 bp, Artificial Sequence
  Description of Artificial Sequence: Synthetic oligonucleotide
  Description of Combined DNA/RNA Molecule: Synthetic oligonucleotide
aaacttagaucatcagtcacacgauaacggtacaaggctaaagcuutgctaacggucgagcatgcacgugaagccattgc

SEQ ID NO: 1425 - DNA, 20 bp, Artificial Sequence
  Description of Artificial Sequence: Synthetic primer
caaggatggcttaacctata

SEQ ID NO: 1426 - DNA, 20 bp, Artificial Sequence
  Description of Artificial Sequence: Synthetic primer
ctttaataagatatatgcgt

SEQ ID NO: 1427 - DNA, 203 bp, Artificial Sequence
  Description of Artificial Sequence: Synthetic polynucleotide
ctttaataagatatatgcgtaacattaggcgagcttcctggcttttatatacccctgtaaaatgcaaggacattttagtctacttaactttgtaaatagttatacttcattttattatctatcattccttaaatagattatgtaagatatgtaattaaaaaaagaaataaaacaagggcaagtcaaggatggcttaacctata

SEQ ID NO: 1428 - DNA, 80 bp, Artificial Sequence
  Description of Artificial Sequence: Synthetic oligonucleotide
  Description of Combined DNA/RNA Molecule: Synthetic oligonucleotide
caaggatggcutaacctataacgauaacggtacaaggctaaagcuutgctaacggucgagctttaataagauatatgcgt

SEQ ID NO: 1429 - DNA, 20 bp, Artificial Sequence
  Description of Artificial Sequence: Synthetic primer
taagagctgctcgaacgtct

SEQ ID NO: 1430 - DNA, 20 bp, Artificial Sequence
  Description of Artificial Sequence: Synthetic primer
cagttcttctacagccacct

SEQ ID NO: 1431 - DNA, 203 bp, Artificial Sequence
  Description of Artificial Sequence: Synthetic polynucleotide
cagttcttctacagccacctgaatgctcttcagtgtcagtggttctttgcccatagctatgaaagcatccccttccctgaagaaatcagagacgctcctgatttccctgcccttgaggttaaacagtttcctcacacggtcattcttccatctgggagagcccaaggcttctgagatgtcagctaagagctgctcgaacgtct

SEQ ID NO: 1432 - DNA, 80 bp, Artificial Sequence
  Description of Artificial Sequence: Synthetic oligonucleotide
  Description of Combined DNA/RNA Molecule: Synthetic oligonucleotide
taagagctgcucgaacgtctacgauaacggtacaaggctaaagcuutgctaacggucgagcagttcttcuacagccacct

SEQ ID NO: 1433 - DNA, 20 bp, Artificial Sequence
  Description of Artificial Sequence: Synthetic primer
cattcgctccggctttattc

SEQ ID NO: 1434 - DNA, 20 bp, Artificial Sequence
  Description of Artificial Sequence: Synthetic primer
cgctctctggcctgcttccc

SEQ ID NO: 1435 - DNA, 203 bp, Artificial Sequence
  Description of Artificial Sequence: Synthetic polynucleotide
gaataaagccggagcgaatgccctgaccgagtctctggctgtgcgacctaccaggtggttctcgtcctgaaaggcgtagtgcagcgcggtgatccactggcagtcgccgttcaccagcacatcgcgctcctctcggaagcacgcggtctgcaaagcaacgaggggtgtcagtctgtgttcactgggaagcaggccagagagcg

SEQ ID NO: 1436 - DNA, 80 bp, Artificial Sequence
  Description of Artificial Sequence: Synthetic oligonucleotide
  Description of Combined DNA/RNA Molecule: Synthetic oligonucleotide
cattcgcuccggctttattcacgauaacggtacaaggctaaagcuutgctaacggucgagcgctctcuggcctgcttccc

SEQ ID NO: 1437 - DNA, 20 bp, Artificial Sequence
  Description of Artificial Sequence: Synthetic primer
cacaacagggaaacattagt

SEQ ID NO: 1438 - DNA, 20 bp, Artificial Sequence
  Description of Artificial Sequence: Synthetic primer
ctggaccaccttccaactgg

SEQ ID NO: 1439 - DNA, 203 bp, Artificial Sequence
  Description of Artificial Sequence: Synthetic polynucleotide
ctggaccaccttccaactggtatactgcagagactccagagaatgatctagatggtaagactttttcccagttactatcactctgattatcttcttgttatctcagcttcaaaaggtctcttaaaaaaggaatgaactccaactttggggacattgattcttactatatgttcacatgcaaaacacaacagggaaacattagt

SEQ ID NO: 1440 - DNA, 80 bp, Artificial Sequence
  Description of Artificial Sequence: Synthetic oligonucleotide
  Description of Combined DNA/RNA Molecule: Synthetic oligonucleotide
cacaacagggaaacautagtacgauaacggtacaaggctaaagcuutgctaacggucgagctggaccaccutccaactgg

SEQ ID NO: 1441 - DNA, 20 bp, Artificial Sequence
  Description of Artificial Sequence: Synthetic primer
ccacctccactcgctgccag

SEQ ID NO: 1442 - DNA, 20 bp, Artificial Sequence
  Description of Artificial Sequence: Synthetic primer
catgtaggggtagatgtgtt

SEQ ID NO: 1443 - DNA, 203 bp, Artificial Sequence
  Description of Artificial Sequence: Synthetic polynucleotide
catgtaggggtagatgtgttcatcccgatagtaggtcttggctgaggcaatgccctggatggaggtgaggcagaggatcctcagggaggcagccccagctgccctgctggcacaaatgccccaccagggcacacccagaaggggccacaggaagatcccagggagtcctctccatctccactcccacctccactcgctgccag

SEQ ID NO: 1444 - DNA, 80 bp, Artificial Sequence
  Description of Artificial Sequence: Synthetic oligonucleotide
  Description of Combined DNA/RNA Molecule: Synthetic oligonucleotide
ccacctccacucgctgccagacgauaacggtacaaggctaaagcuutgctaacggucgagcatgtagggguagatgtgtt

SEQ ID NO: 1445 - DNA, 20 bp, Artificial Sequence
  Description of Artificial Sequence: Synthetic primer
taaaagcatgacaaaaggta

SEQ ID NO: 1446 - DNA, 20 bp, Artificial Sequence
  Description of Artificial Sequence: Synthetic primer
caatttcagtatccagagaa

SEQ ID NO: 1447 - DNA, 203 bp, Artificial Sequence
  Description of Artificial Sequence: Synthetic polynucleotide
caatttcagtatccagagaaagatttgggcctgaagcgatagttttacttcgtttcgtcacctgcttatttttataatgttgaacttttatgtagaaaaaaatgatcgctactttcaactctattatataatttaatttctagatggctcctatgtgtctgttccatcacccttggggaagattaaaagcatgacaaaaggta

SEQ ID NO: 1448 - DNA, 80 bp, Artificial Sequence
  Description of Artificial Sequence: Synthetic oligonucleotide
  Description of Combined DNA/RNA Molecule: Synthetic oligonucleotide
taaaagcaugacaaaaggtaacgauaacggtacaaggctaaagcuutgctaacggucgagcaatttcaguatccagagaa

SEQ ID NO: 1449 - DNA, 20 bp, Artificial Sequence
  Description of Artificial Sequence: Synthetic primer
tcctcttctgcacattttcc

SEQ ID NO: 1450 - DNA, 20 bp, Artificial Sequence
  Description of Artificial Sequence: Synthetic primer
ccgaatgaaaaaactcaaca

SEQ ID NO: 1451 - DNA, 203 bp, Artificial Sequence
  Description of Artificial Sequence: Synthetic polynucleotide
ggaaaatgtgcagaagaggataggcagaaactcaaaaaacatatagacaataacaccagcactcctccaaattgcccaatactatatactaagatttgtaattatgccaagaaaccatatgctcaccttgttacatcaccacacatggcaatcccatacaaccctgagtcccatcatcactgctgttgagttttttcattcgg

SEQ ID NO: 1452 - DNA, 80 bp, Artificial Sequence
  Description of Artificial Sequence: Synthetic oligonucleotide
  Description of Combined DNA/RNA Molecule: Synthetic oligonucleotide
tcctcttcugcacattttccacgauaacggtacaaggctaaagcuutgctaacggucgagccgaaugaaaaaactcaaca

SEQ ID NO: 1453 - DNA, 20 bp, Artificial Sequence
  Description of Artificial Sequence: Synthetic primer
aggctctgacaggtgacatg

SEQ ID NO: 1454 - DNA, 20 bp, Artificial Sequence
  Description of Artificial Sequence: Synthetic primer
ccggctcagcagcttgtggg

SEQ ID NO: 1455 - DNA, 204 bp, Artificial Sequence
  Description of Artificial Sequence: Synthetic polynucleotide
catgtcacctgtcagagcctacgctcactgggggctgcctccgtgcagccctgccagggactgtgaggcctgggtgggatcagaggccactcggcgcctccttcctgcctggaccagctctgtcacccacccctgtctttggtgccacaggagctggatggcctgttggaaatcaaccgcatgacccacaagctgctgagccgg

SEQ ID NO: 1456 - DNA, 80 bp, Artificial Sequence
  Description of Artificial Sequence: Synthetic oligonucleotide
  Description of Combined DNA/RNA Molecule: Synthetic oligonucleotide
aggctcugacaggtgacatgacgauaacggtacaaggctaaagcuutgctaacggucgagccggcucagcagcttgtggg

SEQ ID NO: 1457 - DNA, 20 bp, Artificial Sequence
  Description of Artificial Sequence: Synthetic primer
agcaccctgtcctccacccc

SEQ ID NO: 1458 - DNA, 20 bp, Artificial Sequence
  Description of Artificial Sequence: Synthetic primer
ctggacgttgatgccactga

SEQ ID NO: 1459 - DNA, 204 bp, Artificial Sequence
  Description of Artificial Sequence: Synthetic polynucleotide
ggggtggaggacagggtgctcgggggggctgctgtctccaggcccagttgggggctgttccaggacttaggctgtgtgggaatctctaccctcaggccattacaggccggtccagctgcctggctaaggtgttcccctgtgcccccctagatcgggaaagtctgtgtggaaaactgccaggcattcagtggcatcaacgtccag

SEQ ID NO: 1460 - DNA, 80 bp, Artificial Sequence
  Description of Artificial Sequence: Synthetic oligonucleotide
  Description of Combined DNA/RNA Molecule: Synthetic oligonucleotide
agcaccctgucctccaccccacgauaacggtacaaggctaaagcuutgctaacggucgagctggacgtugatgccactga

SEQ ID NO: 1461 - DNA, 20 bp, Artificial Sequence
  Description of Artificial Sequence: Synthetic primer
ctgagcaagcatcttactat

SEQ ID NO: 1462 - DNA, 20 bp, Artificial Sequence
  Description of Artificial Sequence: Synthetic primer
cttccccctgacctgtttga

SEQ ID NO: 1463 - DNA, 204 bp, Artificial Sequence
  Description of Artificial Sequence: Synthetic polynucleotide
cttccccctgacctgtttgaagcaggcctccacaaggtttggtggaaacatatttctgcagaaaaacatgagaagaaggaaagtggttagaccatggaagggcatctagggtgataacagtaatactaacaccaagaacaacaatagtgcagccaacatatgaatgcttcctctaggctgggcactgagcaagcatcttactat

SEQ ID NO: 1464 - DNA, 80 bp, Artificial Sequence
  Description of Artificial Sequence: Synthetic oligonucleotide
  Description of Combined DNA/RNA Molecule: Synthetic oligonucleotide
ctgagcaagcaucttactatacgauaacggtacaaggctaaagcuutgctaacggucgagcttcccccugacctgtttga

SEQ ID NO: 1465 - DNA, 20 bp, Artificial Sequence
  Description of Artificial Sequence: Synthetic primer
tggcagagtagtcagagtag

SEQ ID NO: 1466 - DNA, 20 bp, Artificial Sequence
  Description of Artificial Sequence: Synthetic primer
cgagcgtgccacgcgctaca

SEQ ID NO: 1467 - DNA, 204 bp, Artificial Sequence
  Description of Artificial Sequence: Synthetic polynucleotide
cgagcgtgccacgcgctacaactacaccagcgaggagaagtttgccctagtggaggtgaggatgctcggccgctcgctcttcctcatgtcgctctagcttcacaccatcttctctgtcaaaagcaaaaacatgaacaaaactgcctgtttactcattgcttctgtgtgggcacccctttccatctggcagagtagtcagagtag

SEQ ID NO: 1468 - DNA, 80 bp, Artificial Sequence
  Description of Artificial Sequence: Synthetic oligonucleotide
  Description of Combined DNA/RNA Molecule: Synthetic oligonucleotide
tggcagaguagtcagagtagacgauaacggtacaaggctaaagcuutgctaacggucgagcgagcgugccacgcgctaca

SEQ ID NO: 1469 - DNA, 20 bp, Artificial Sequence
  Description of Artificial Sequence: Synthetic primer
tcgaaatagctcctcaagta

SEQ ID NO: 1470 - DNA, 20 bp, Artificial Sequence
  Description of Artificial Sequence: Synthetic primer
cattggaaactaaaaagata

SEQ ID NO: 1471 - DNA, 204 bp, Artificial Sequence
  Description of Artificial Sequence: Synthetic polynucleotide
cattggaaactaaaaagatagaatctgaaagtaaaggaatcaaaggaggaaaaaaagtttataaaagtttgattactggaaaagttcgatctaattcagaaatttcaggccaaatgaaacagccccttcaagcaaacatgccttcaatctctcgaggcaggacaatgattcatattccaggagttcgaaatagctcctcaagta

SEQ ID NO: 1472 - DNA, 80 bp, Artificial Sequence
  Description of Artificial Sequence: Synthetic oligonucleotide
  Description of Combined DNA/RNA Molecule: Synthetic oligonucleotide
tcgaaatagcucctcaagtaacgauaacggtacaaggctaaagcuutgctaacggucgagcattggaaacuaaaaagata

SEQ ID NO: 1473 - DNA, 20 bp, Artificial Sequence
  Description of Artificial Sequence: Synthetic primer
aactgtctgtctcaaaggta

SEQ ID NO: 1474 - DNA, 20 bp, Artificial Sequence
  Description of Artificial Sequence: Synthetic primer
cccaggggtcagcccacatt

SEQ ID NO: 1475 - DNA, 204 bp, Artificial Sequence
  Description of Artificial Sequence: Synthetic polynucleotide
cccaggggtcagcccacattcactaagaaaaagaagaccatccgtttgttctggaatgaagttcggccttttgactggccatgtaaaaacaaccgacgctgcagagaattcctgtggtcaaaactggaacccattaaggtggacacttccagactggagcacctgtttgagtctaaatccaaggaactgtctgtctcaaaggta

SEQ ID NO: 1476 - DNA, 80 bp, Artificial Sequence
  Description of Artificial Sequence: Synthetic oligonucleotide
  Description of Combined DNA/RNA Molecule: Synthetic oligonucleotide
aactgtctguctcaaaggtaacgauaacggtacaaggctaaagcuutgctaacggucgagcccaggggucagcccacatt

SEQ ID NO: 1477 - DNA, 20 bp, Artificial Sequence
  Description of Artificial Sequence: Synthetic primer
caccccaaaacccacccatt

SEQ ID NO: 1478 - DNA, 20 bp, Artificial Sequence
  Description of Artificial Sequence: Synthetic primer
cacagctgcccgcatcccca

SEQ ID NO: 1479 - DNA, 205 bp, Artificial Sequence
  Description of Artificial Sequence: Synthetic polynucleotide
cacagctgcccgcatccccatccgccccgtggccttgttgtccagggatgccatacctgaaggacagatgatgtggcccccgcagctccatgcatacccaacgccagctctcctagcatccgttccaccctccccatatcaccaactcaacagccgacccaccaagcatcccttttcctatagcccaccccaaaacccacccatt

SEQ ID NO: 1480 - DNA, 80 bp, Artificial Sequence
  Description of Artificial Sequence: Synthetic oligonucleotide
  Description of Combined DNA/RNA Molecule: Synthetic oligonucleotide
caccccaaaacccacccautacgauaacggtacaaggctaaagcuutgctaacggucgagcacagcugcccgcatcccca

SEQ ID NO: 1481 - DNA, 20 bp, Artificial Sequence
  Description of Artificial Sequence: Synthetic primer
attgacacacatactgttct

SEQ ID NO: 1482 - DNA, 20 bp, Artificial Sequence
  Description of Artificial Sequence: Synthetic primer
cttatccaggatggtgatga

SEQ ID NO: 1483 - DNA, 205 bp, Artificial Sequence
  Description of Artificial Sequence: Synthetic polynucleotide
agaacagtatgtgtgtcaattccgtttgctattatttttctgagaaaatataagaatcctgacattttgaaacatgaagaataaatgttgaagtgttaatagtaaaacatcctcactttgatggttgtagcctttgaagaagatggtggagagaattcgcaagttccagattctcaatgatgagatcatcaccatcctggataag

SEQ ID NO: 1484 - DNA, 80 bp, Artificial Sequence
  Description of Artificial Sequence: Synthetic oligonucleotide
  Description of Combined DNA/RNA Molecule: Synthetic oligonucleotide
attgacacacauactgttctacgauaacggtacaaggctaaagcuutgctaacggucgagcttatccaggauggtgatga

SEQ ID NO: 1485 - DNA, 20 bp, Artificial Sequence
  Description of Artificial Sequence: Synthetic primer
ttgtgtgtgcactgatgtgt

SEQ ID NO: 1486 - DNA, 20 bp, Artificial Sequence
  Description of Artificial Sequence: Synthetic primer
cttgatctggcggtaggtga

SEQ ID NO: 1487 - DNA, 205 bp, Artificial Sequence
  Description of Artificial Sequence: Synthetic polynucleotide
cttgatctggcggtaggtgagctgatatgggcgcagggcaaaggccaggctgacccctagggccaaaagaaggggtccatggactgaagtctgggtcgctcagccccaggcagggtccatccatcccaagaagggtagggcaagggtgggagtgagggagagaaatatcctatgagtgtgtgtatttgtgtgtgcactgatgtgt

SEQ ID NO: 1488 - DNA, 80 bp, Artificial Sequence
  Description of Artificial Sequence: Synthetic oligonucleotide
  Description of Combined DNA/RNA Molecule: Synthetic oligonucleotide
ttgtgtgugcactgatgtgtacgauaacggtacaaggctaaagcuutgctaacggucgagcttgatcuggcggtaggtga

SEQ ID NO: 1489 - DNA, 20 bp, Artificial Sequence
  Description of Artificial Sequence: Synthetic primer
tccgcgtggcctgtcaggta

SEQ ID NO: 1490 - DNA, 20 bp, Artificial Sequence
  Description of Artificial Sequence: Synthetic primer
ccgcatacccattagctggg

SEQ ID NO: 1491 - DNA, 205 bp, Artificial Sequence
  Description of Artificial Sequence: Synthetic polynucleotide
ccgcatacccattagctgggtgaaaagtcaagcctgggttggaaattagtgttgcgattctcttcctgcctgaaaggaggtccttttccaggtctttgggaggagccagtcgctacctggagcagactctctcctcgccaagcccattgacaagcagcacacagacactgtggtgaacttccttatccgcgtggcctgtcaggta

SEQ ID NO: 1492 - DNA, 80 bp, Artificial Sequence
  Description of Artificial Sequence: Synthetic oligonucleotide
  Description of Combined DNA/RNA Molecule: Synthetic oligonucleotide
tccgcgtggccugtcaggtaacgauaacggtacaaggctaaagcuutgctaacggucgagccgcatacccautagctggg

SEQ ID NO: 1493 - DNA, 20 bp, Artificial Sequence
  Description of Artificial Sequence: Synthetic primer
tctcaagaggcaatgtgaag

SEQ ID NO: 1494 - DNA, 20 bp, Artificial Sequence
  Description of Artificial Sequence: Synthetic primer
ctgcagcactttggggattg

SEQ ID NO: 1495 - DNA, 205 bp, Artificial Sequence
  Description of Artificial Sequence: Synthetic polynucleotide
ctgcagcactttggggattgtgctctcattgatgccctgtagattcagctgccactctccaagtttcaggaagcatctggaagcagagaaacaagcccccatgacattccctcctcaaaacagccctcctaagaggaccacaaattgttaggggacactgaagcccttctggtatttcctcttattctcaagaggcaatgtgaag

SEQ ID NO: 1496 - DNA, 80 bp, Artificial Sequence
  Description of Artificial Sequence: Synthetic oligonucleotide
  Description of Combined DNA/RNA Molecule: Synthetic oligonucleotide
tctcaagaggcaaugtgaagacgauaacggtacaaggctaaagcuutgctaacggucgagctgcagcacuttggggattg

SEQ ID NO: 1497 - DNA, 20 bp, Artificial Sequence
  Description of Artificial Sequence: Synthetic primer
gtcatctttcatccactgta

SEQ ID NO: 1498 - DNA, 20 bp, Artificial Sequence
  Description of Artificial Sequence: Synthetic primer
cttcccagcatcagacatcc

SEQ ID NO: 1499 - DNA, 205 bp, Artificial Sequence
  Description of Artificial Sequence: Synthetic polynucleotide
cttcccagcatcagacatccgggtggatgggatcagaaggcggtggacatatttctccttctgaatctttattctatggatgaaatggaaattcgagtttaccgtatggtgattcagaggaaactgggaattactggaatgtagcaagacaaaacaactgacctgtctgtgatctgcagttcctggtcatctttcatccactgta

SEQ ID NO: 1500 - DNA, 80 bp, Artificial Sequence
  Description of Artificial Sequence: Synthetic oligonucleotide
  Description of Combined DNA/RNA Molecule: Synthetic oligonucleotide
gtcatcttucatccactgtaacgauaacggtacaaggctaaagcuutgctaacggucgagcttcccagcaucagacatcc

SEQ ID NO: 1501 - DNA, 20 bp, Artificial Sequence
  Description of Artificial Sequence: Synthetic primer
agagttaggtagaaaagaat

SEQ ID NO: 1502 - DNA, 20 bp, Artificial Sequence
  Description of Artificial Sequence: Synthetic primer
cccctttttccactcatagc

SEQ ID NO: 1503 - DNA, 206 bp, Artificial Sequence
  Description of Artificial Sequence: Synthetic polynucleotide
attcttttctacctaactctattatgttagaaacacataaaaatacttactaaatctgctcaatgttattgtaaatataaaatatggggaggcatcgggctgtccttttgctaatacaatatcaaaaaaaccgggggaagtcatacttacgagtaaacatggtaagaaaccaagggatggcatagagctatgagtggaaaaagggg

SEQ ID NO: 1504 - DNA, 80 bp, Artificial Sequence
  Description of Artificial Sequence: Synthetic oligonucleotide
  Description of Combined DNA/RNA Molecule: Synthetic oligonucleotide
agagttagguagaaaagaatacgauaacggtacaaggctaaagcuutgctaacggucgagccccttttuccactcatagc

SEQ ID NO: 1505 - DNA, 20 bp, Artificial Sequence
  Description of Artificial Sequence: Synthetic primer
cacagaagcatgagcaggta

SEQ ID NO: 1506 - DNA, 20 bp, Artificial Sequence
  Description of Artificial Sequence: Synthetic primer
ctttagaatactaaatattt

SEQ ID NO: 1507 - DNA, 206 bp, Artificial Sequence
  Description of Artificial Sequence: Synthetic polynucleotide
ctttagaatactaaatatttatatttactaatatatatgtatgtgtatgtattcataattagctaaatttagaaaactctcctttcctggacaagctacaaatttatcattaaaatcagcagcagatgttaaaataactatacttacaaagccatccattgcccaattttcttccttcattttcttcacagaagcatgagcaggta

SEQ ID NO: 1508 - DNA, 80 bp, Artificial Sequence
  Description of Artificial Sequence: Synthetic oligonucleotide
  Description of Combined DNA/RNA Molecule: Synthetic oligonucleotide
cacagaagcaugagcaggtaacgauaacggtacaaggctaaagcuutgctaacggucgagctttagaauactaaatattt

SEQ ID NO: 1509 - DNA, 20 bp, Artificial Sequence
  Description of Artificial Sequence: Synthetic primer
cagcctggagacttcccccc

SEQ ID NO: 1510 - DNA, 20 bp, Artificial Sequence
  Description of Artificial Sequence: Synthetic primer
ctatcagtattctagcaata

SEQ ID NO: 1511 - DNA, 206 bp, Artificial Sequence
  Description of Artificial Sequence: Synthetic polynucleotide
ggggggaagtctccaggctgacaactgagccaaattttatggttttcttggggtgggaggtaggatgggggggcgatattttaaagaaagaaagaaaaaaagaaaaaggcataatcatccctcaggcattcaaacaaaggaataccttacccatggcactactgtgaagaggcctccttcggggattattgctagaatactgatag

SEQ ID NO: 1512 - DNA, 80 bp, Artificial Sequence
  Description of Artificial Sequence: Synthetic oligonucleotide
  Description of Combined DNA/RNA Molecule: Synthetic oligonucleotide
cagcctggagacutccccccacgauaacggtacaaggctaaagcuutgctaacggucgagctatcagtautctagcaata

SEQ ID NO: 1513 - DNA, 20 bp, Artificial Sequence
  Description of Artificial Sequence: Synthetic primer
agttaagtcgggggatgtca

SEQ ID NO: 1514 - DNA, 20 bp, Artificial Sequence
  Description of Artificial Sequence: Synthetic primer
ccctgaagtattgggcagca

SEQ ID NO: 1515 - DNA, 206 bp, Artificial Sequence
  Description of Artificial Sequence: Synthetic polynucleotide
tgacatcccccgacttaactacaatcttgaagtgcttttaaaaagctaacaaaaacctcccaactcctaaataagattttacttacgaaaaaaaaaagaaaaagaaagttaaaacaagaaaaagtcttatgtaaccagcaaattccatacctatgacatttacaatggccttcagtgctccaagaatgctgcccaatacttcaggg

SEQ ID NO: 1516 - DNA, 80 bp, Artificial Sequence
  Description of Artificial Sequence: Synthetic oligonucleotide
  Description of Combined DNA/RNA Molecule: Synthetic oligonucleotide
agttaagucgggggatgtcaacgauaacggtacaaggctaaagcuutgctaacggucgagccctgaaguattgggcagca

SEQ ID NO: 1517 - DNA, 20 bp, Artificial Sequence
  Description of Artificial Sequence: Synthetic primer
gtgggctcagacgggaagga

SEQ ID NO: 1518 - DNA, 20 bp, Artificial Sequence
  Description of Artificial Sequence: Synthetic primer
cagggcctgagaaggtcccc

SEQ ID NO: 1519 - DNA, 206 bp, Artificial Sequence
  Description of Artificial Sequence: Synthetic polynucleotide
cagggcctgagaaggtccccagacccaacctccaccccacacacaccacaggcccagacgccagcaagttccacacctggacttccaggggctgccttggcttctgtgccccggggtctttctcatccatgtagcccagctgggcttccattttgtctgaaagatcaagggaaagagctgagacaggtgggctcagacgggaagga

SEQ ID NO: 1520 - DNA, 80 bp, Artificial Sequence
  Description of Artificial Sequence: Synthetic oligonucleotide
  Description of Combined DNA/RNA Molecule: Synthetic oligonucleotide
gtgggcucagacgggaaggaacgauaacggtacaaggctaaagcuutgctaacggucgagcagggccugagaaggtcccc

SEQ ID NO: 1521 - DNA, 20 bp, Artificial Sequence
  Description of Artificial Sequence: Synthetic primer
atttatggactaaaattaat

SEQ ID NO: 1522 - DNA, 20 bp, Artificial Sequence
  Description of Artificial Sequence: Synthetic primer
cccattggcaagtgttcctg

SEQ ID NO: 1523 - DNA, 207 bp, Artificial Sequence
  Description of Artificial Sequence: Synthetic polynucleotide
cccattggcaagtgttcctgcaatgctggctatgaagaaagaggttttatgtgccaaggtaagagccttctctatttttctttgagcaatatttctcacctatgagtttatcatagtgtcattaaatgaaatgcactcagtctcaactcacttggcaggaaaacatgcctcaaactgaccatagtctatttatggactaaaattaat

SEQ ID NO: 1524 - DNA, 80 bp, Artificial Sequence
  Description of Artificial Sequence: Synthetic oligonucleotide
  Description of Combined DNA/RNA Molecule: Synthetic oligonucleotide
atttatggacuaaaattaatacgauaacggtacaaggctaaagcuutgctaacggucgagcccattggcaagugttcctg

SEQ ID NO: 1525 - DNA, 20 bp, Artificial Sequence
  Description of Artificial Sequence: Synthetic primer
tatcatagattgtaaagaga

SEQ ID NO: 1526 - DNA, 20 bp, Artificial Sequence
  Description of Artificial Sequence: Synthetic primer
catgggctgaggaatgttca

SEQ ID NO: 1527 - DNA, 207 bp, Artificial Sequence
  Description of Artificial Sequence: Synthetic polynucleotide
tctctttacaatctatgataataacaagaaaaaaatctgaggcaaattaagacaaagttttttaaaaatctgatacaatctttgaatcgctaaatgaataactgagaagacttagatcctaaaacaccaaaatcttattttataatttacctttaagcctgaagaaaactctaccatttcttctgcttgaacattcctcagcccatg

SEQ ID NO: 1528 - DNA, 80 bp, Artificial Sequence
  Description of Artificial Sequence: Synthetic oligonucleotide
  Description of Combined DNA/RNA Molecule: Synthetic oligonucleotide
tatcatagautgtaaagagaacgauaacggtacaaggctaaagcuutgctaacggucgagcatgggcugaggaatgttca

SEQ ID NO: 1529 - DNA, 20 bp, Artificial Sequence
  Description of Artificial Sequence: Synthetic primer
cctcagctgaacttcccaga

SEQ ID NO: 1530 - DNA, 20 bp, Artificial Sequence
  Description of Artificial Sequence: Synthetic primer
ctgctggaaggcctcgggtc

SEQ ID NO: 1531 - DNA, 207 bp, Artificial Sequence
  Description of Artificial Sequence: Synthetic polynucleotide
tctgggaagttcagctgaggcccttattacaagacgagaagggtccagttccctggggctgtcaaggaagatgctcttccacactgccgctcgaggcgaccctcctctggtatcctgggcctcactgagatgcttttcctatctgcacagatcatcaccctgagggattacatccccaggatcctgggacccgaggccttccagcag

SEQ ID NO: 1532 - DNA, 80 bp, Artificial Sequence
  Description of Artificial Sequence: Synthetic oligonucleotide
  Description of Combined DNA/RNA Molecule: Synthetic oligonucleotide
cctcagcugaacttcccagaacgauaacggtacaaggctaaagcuutgctaacggucgagctgctggaaggccucgggtc

SEQ ID NO: 1533 - DNA, 20 bp, Artificial Sequence
  Description of Artificial Sequence: Synthetic primer
ttgacctttcagaatatgtg

SEQ ID NO: 1534 - DNA, 20 bp, Artificial Sequence
  Description of Artificial Sequence: Synthetic primer
cccctgccctctgagactga

SEQ ID NO: 1535 - DNA, 207 bp, Artificial Sequence
  Description of Artificial Sequence: Synthetic polynucleotide
cccctgccctctgagactgatggctacgttgcccccctgacctgcagcccccagcctggtatggagtccagtctaagcagagagactgatgggcaggggaggtgggaccttcagcccagggtccactgtgggggcagagggagtggcagagacaccggggttccttcccctaatgggtcaccttctcttgacctttcagaatatgtg

SEQ ID NO: 1536 - DNA, 80 bp, Artificial Sequence
  Description of Artificial Sequence: Synthetic oligonucleotide
  Description of Combined DNA/RNA Molecule: Synthetic oligonucleotide
ttgaccttucagaatatgtgacgauaacggtacaaggctaaagcuutgctaacggucgagcccctgcccuctgagactga

SEQ ID NO: 1537 - DNA, 20 bp, Artificial Sequence
  Description of Artificial Sequence: Synthetic primer
gtatgtgagactcctgagta

SEQ ID NO: 1538 - DNA, 20 bp, Artificial Sequence
  Description of Artificial Sequence: Synthetic primer
ctcactgtggccagatgacc

SEQ ID NO: 1539 - DNA, 207 bp, Artificial Sequence
  Description of Artificial Sequence: Synthetic polynucleotide
ctcactgtggccagatgaccttcttccagtggtcctggaccctgtctgtgtggactgtccatgaccagagtgggcatgtctggtggtatcgcctgtctgtccatgtatagttccatgtctctcatgaactatggattctgactctccatgttgagatctggcttggccatgagtgtgtcctgaatgtgtatgtgagactcctgagta

SEQ ID NO: 1540 - DNA, 80 bp, Artificial Sequence
  Description of Artificial Sequence: Synthetic oligonucleotide
  Description of Combined DNA/RNA Molecule: Synthetic oligonucleotide
gtatgtgagacucctgagtaacgauaacggtacaaggctaaagcuutgctaacggucgagctcactguggccagatgacc

SEQ ID NO: 1541 - DNA, 20 bp, Artificial Sequence
  Description of Artificial Sequence: Synthetic primer
aaagccgacccctcccatcc

SEQ ID NO: 1542 - DNA, 20 bp, Artificial Sequence
  Description of Artificial Sequence: Synthetic primer
cagatcagggagtgggtata

SEQ ID NO: 1543 - DNA, 208 bp, Artificial Sequence
  Description of Artificial Sequence: Synthetic polynucleotide
cagatcagggagtgggtataagtcaggggtggcctgccaaagggggatgggtatggcgggacccactcactttcagggccgcgcacacagacgccatgcacgaaggccaggtgcgtgtgggagacctggctcatgaggctggctgtctcgtagaaggcctgtggggaccgggcaggtcaggtggctgcaaagccgacccctcccatcc

SEQ ID NO: 1544 - DNA, 80 bp, Artificial Sequence
  Description of Artificial Sequence: Synthetic oligonucleotide
  Description of Combined DNA/RNA Molecule: Synthetic oligonucleotide
aaagccgaccccucccatccacgauaacggtacaaggctaaagcuutgctaacggucgagcagatcagggagugggtata

SEQ ID NO: 1545 - DNA, 20 bp, Artificial Sequence
  Description of Artificial Sequence: Synthetic primer
ttcaacaaatctgaatagct

SEQ ID NO: 1546 - DNA, 20 bp, Artificial Sequence
  Description of Artificial Sequence: Synthetic primer
ctccatgcctttggcaacat

SEQ ID NO: 1547 - DNA, 208 bp, Artificial Sequence
  Description of Artificial Sequence: Synthetic polynucleotide
agctattcagatttgttgaatttctagcttaaccttcaagaaacaaaaaatggttaagatgatataaaataacaactcttacacatcatttgcttttttgatattcgttttgaccatttcatctctgttaaatctatttttaaattctaggattcttgatttgcagtctaaattaattattgcagtagatgttgccaaaggcatggag

SEQ ID NO: 1548 - DNA, 80 bp, Artificial Sequence
  Description of Artificial Sequence: Synthetic oligonucleotide
  Description of Combined DNA/RNA Molecule: Synthetic oligonucleotide
ttcaacaaauctgaatagctacgauaacggtacaaggctaaagcuutgctaacggucgagctccatgccuttggcaacat

SEQ ID NO: 1549 - DNA, 20 bp, Artificial Sequence
  Description of Artificial Sequence: Synthetic primer
gtgccagtcctagggggctt

SEQ ID NO: 1550 - DNA, 20 bp, Artificial Sequence
  Description of Artificial Sequence: Synthetic primer
cctcccgagcagtccaagag

SEQ ID NO: 1551 - DNA, 208 bp, Artificial Sequence
  Description of Artificial Sequence: Synthetic polynucleotide
aagccccctaggactggcaccagggccacctgccgcagcaaggggctgctttcaagagtggctgggcatggctattggtcactgcacctcacaggcaccgagggctgagggcggagatgaagccgcctaccttgacatggcctttgtaggctgttccgatgcctcgctgcacgtccacgcccagaggcctcttggactgctcgggagg

SEQ ID NO: 1552 - DNA, 80 bp, Artificial Sequence
  Description of Artificial Sequence: Synthetic oligonucleotide
  Description of Combined DNA/RNA Molecule: Synthetic oligonucleotide
gtgccagtccuagggggcttacgauaacggtacaaggctaaagcuutgctaacggucgagcctcccgagcaguccaagag

SEQ ID NO: 1553 - DNA, 20 bp, Artificial Sequence
  Description of Artificial Sequence: Synthetic primer
cttgcatacaaagcagaata

SEQ ID NO: 1554 - DNA, 20 bp, Artificial Sequence
  Description of Artificial Sequence: Synthetic primer
caaacttgtccccgagcgac

SEQ ID NO: 1555 - DNA, 208 bp, Artificial Sequence
  Description of Artificial Sequence: Synthetic polynucleotide
tattctgctttgtatgcaagccaagcaatacactggtggaggaggcaggaaaagcaagttgagtaagagccagggtggaggggggcactcacccaggtcctggaaggggtaggggtaggtgggtgaactggggctttctaccaagctcacctgcagtctctcccaccagatctggcggatgatctctcgtcgctcggggacaagtttg

SEQ ID NO: 1556 - DNA, 80 bp, Artificial Sequence
  Description of Artificial Sequence: Synthetic oligonucleotide
  Description of Combined DNA/RNA Molecule: Synthetic oligonucleotide
cttgcauacaaagcagaataacgauaacggtacaaggctaaagcuutgctaacggucgagcaaacttguccccgagcgac

SEQ ID NO: 1557 - DNA, 20 bp, Artificial Sequence
  Description of Artificial Sequence: Synthetic primer
tcaatcacttctctgatgtg

SEQ ID NO: 1558 - DNA, 20 bp, Artificial Sequence
  Description of Artificial Sequence: Synthetic primer
ctgggaggctgcacgttacc

SEQ ID NO: 1559 - DNA, 208 bp, Artificial Sequence
  Description of Artificial Sequence: Synthetic polynucleotide
cacatcagagaagtgattgatgctgcagtctcttttcagttcagaggagagagacttctatccatcaatagtttggaagttctcaattatgtaatataaatgatcaagattaatcgccttttctttatttttcttctaaacaatgtccagattcctccaaaggacctcaatcgtcttcaggtgtaaatggtaacgtgcagcctcccag

SEQ ID NO: 1560 - DNA, 80 bp, Artificial Sequence
  Description of Artificial Sequence: Synthetic oligonucleotide
  Description of Combined DNA/RNA Molecule: Synthetic oligonucleotide
tcaatcactuctctgatgtgacgauaacggtacaaggctaaagcuutgctaacggucgagctgggaggcugcacgttacc

SEQ ID NO: 1561 - DNA, 20 bp, Artificial Sequence
  Description of Artificial Sequence: Synthetic primer
atcatagaggaagggaagta

SEQ ID NO: 1562 - DNA, 20 bp, Artificial Sequence
  Description of Artificial Sequence: Synthetic primer
cagacccaagcatgacccca

SEQ ID NO: 1563 - DNA, 208 bp, Artificial Sequence
  Description of Artificial Sequence: Synthetic polynucleotide
cagacccaagcatgaccccagcacgtgggagtgatgtgttggaggtgtgcaccaggctcttgaggcgctggctctgccagcctcagcatagcacctttcctgcccacaggcacaacgaggccctcttggaggaggcgaagatgatgaacagactgagacacagccgggtggtgaagctcctgggcgtcatcatagaggaagggaagta

SEQ ID NO: 1564 - DNA, 80 bp, Artificial Sequence
  Description of Artificial Sequence: Synthetic oligonucleotide
  Description of Combined DNA/RNA Molecule: Synthetic oligonucleotide
atcauagaggaagggaagtaacgauaacggtacaaggctaaagcuutgctaacggucgagcagacccaagcaugacccca

SEQ ID NO: 1565 - DNA, 20 bp, Artificial Sequence
  Description of Artificial Sequence: Synthetic primer
agattctaaagataactgcc

SEQ ID NO: 1566 - DNA, 20 bp, Artificial Sequence
  Description of Artificial Sequence: Synthetic primer
cttccaatattccttcaagt

SEQ ID NO: 1567 - DNA, 209 bp, Artificial Sequence
  Description of Artificial Sequence: Synthetic polynucleotide
ggcagttatctttagaatctcaatcgcctgctctccctttcttctttccagtatggtgactacgaccccagtgttcacaagcggggatttttggcccaagaggaattgcttccaaaaagggtaagagattaaattcccttttcaggaagacatagcagatatgtggtctaaaagaaagctaaccaaaggacttgaaggaatattggaag

SEQ ID NO: 1568 - DNA, 80 bp, Artificial Sequence
  Description of Artificial Sequence: Synthetic oligonucleotide
  Description of Combined DNA/RNA Molecule: Synthetic oligonucleotide
agattcuaaagataactgccacgauaacggtacaaggctaaagcuutgctaacggucgagcttccaatautccttcaagt

SEQ ID NO: 1569 - DNA, 20 bp, Artificial Sequence
  Description of Artificial Sequence: Synthetic primer
attgcatgggacacactcat

SEQ ID NO: 1570 - DNA, 20 bp, Artificial Sequence
  Description of Artificial Sequence: Synthetic primer
caaaagcctcagaaaaaacg

SEQ ID NO: 1571 - DNA, 209 bp, Artificial Sequence
  Description of Artificial Sequence: Synthetic polynucleotide
caaaagcctcagaaaaaacgtgatgggcacatctgggcctccagttaccagaaagggcacctaagaaggcagaaagaaaaggaatattttaataatttgagcttcttcaaaggtttacacagataacttgaaaatgaaaaggccaaggtctgacaaccctagggtattccctgagctctcccacagctaattgcatgggacacactcat

SEQ ID NO: 1572 - DNA, 80 bp, Artificial Sequence
  Description of Artificial Sequence: Synthetic oligonucleotide
  Description of Combined DNA/RNA Molecule: Synthetic oligonucleotide
attgcaugggacacactcatacgauaacggtacaaggctaaagcuutgctaacggucgagcaaaagccucagaaaaaacg

SEQ ID NO: 1573 - DNA, 20 bp, Artificial Sequence
  Description of Artificial Sequence: Synthetic primer
gttcatcttctatgtaagta

SEQ ID NO: 1574 - DNA, 20 bp, Artificial Sequence
  Description of Artificial Sequence: Synthetic primer
cttgtcttatttcttataaa

SEQ ID NO: 1575 - DNA, 210 bp, Artificial Sequence
  Description of Artificial Sequence: Synthetic polynucleotide
cttgtcttatttcttataaatttaatcatagtttcaaaatttttacagcatctacggtattaactgcccaagaatcattttccggttcacttgggcatttacagaataggaacaacagttgtgattccagaggacagactactaaagccaggtttttatatgggtaaggaaacggaaacagtttttaaatgttcatcttctatgtaagta

SEQ ID NO: 1576 - DNA, 80 bp, Artificial Sequence
  Description of Artificial Sequence: Synthetic oligonucleotide
  Description of Combined DNA/RNA Molecule: Synthetic oligonucleotide
gttcatctuctatgtaagtaacgauaacggtacaaggctaaagcuutgctaacggucgagcttgtcttauttcttataaa

SEQ ID NO: 1577 - DNA, 20 bp, Artificial Sequence
  Description of Artificial Sequence: Synthetic primer
tgagaatttttatttaaatg

SEQ ID NO: 1578 - DNA, 20 bp, Artificial Sequence
  Description of Artificial Sequence: Synthetic primer
catgttccgcatggataacg

SEQ ID NO: 1579 - DNA, 210 bp, Artificial Sequence
  Description of Artificial Sequence: Synthetic polynucleotide
catttaaataaaaattctcaactcatttgctctgaatgtttagtcaccgccaggctgccgtgagagcctttcccttggcttcagtgttctctccaccagcactggccccacaagcaaaagcactccccgtcaggttcctcgctgtctcaccttgcgggccctcctgtgagcgtcgcgtcaatcacatggtcgttatccatgcggaacatg

SEQ ID NO: 1580 - DNA, 80 bp, Artificial Sequence
  Description of Artificial Sequence: Synthetic oligonucleotide
  Description of Combined DNA/RNA Molecule: Synthetic oligonucleotide
tgagaatttutatttaaatgacgauaacggtacaaggctaaagcuutgctaacggucgagcatgttccgcauggataacg

SEQ ID NO: 1581 - DNA, 20 bp, Artificial Sequence
  Description of Artificial Sequence: Synthetic primer
acacaatgtaacatgaagtt

SEQ ID NO: 1582 - DNA, 20 bp, Artificial Sequence
  Description of Artificial Sequence: Synthetic primer
ctgcagcaggtagatccgca

SEQ ID NO: 1583 - DNA, 210 bp, Artificial Sequence
  Description of Artificial Sequence: Synthetic polynucleotide
aacttcatgttacattgtgtgtgtgtgtgtgtgtgtgtgtgtgtgtgtgtgtgtgtgtgtgtgtttttaaggcttaaacctgtcgtatgaccctcagtcagtaacccagttcacaactggaaatgagtccttcctgctgtccctgcacaggtcctggaccccgagaagcaggcggacatgctggactcgctgcggatctacctgctgcag

SEQ ID NO: 1584 - DNA, 80 bp, Artificial Sequence
  Description of Artificial Sequence: Synthetic oligonucleotide
  Description of Combined DNA/RNA Molecule: Synthetic oligonucleotide
acacaatguaacatgaagttacgauaacggtacaaggctaaagcuutgctaacggucgagctgcagcagguagatccgca

SEQ ID NO: 1585 - DNA, 20 bp, Artificial Sequence
  Description of Artificial Sequence: Synthetic primer
aaacatggagcctgtgtctg

SEQ ID NO: 1586 - DNA, 20 bp, Artificial Sequence
  Description of Artificial Sequence: Synthetic primer
cttctcttttcctggagagc

SEQ ID NO: 1587 - DNA, 210 bp, Artificial Sequence
  Description of Artificial Sequence: Synthetic polynucleotide
cagacacaggctccatgtttgaggtgccgcgtcaaggaagtggtcccatgcttgggatggccttggctctgggttcaagctgaggctctagacgggtcttggaggccaacactggcctgggctctctcacctgtgaccaggctggagacaatgagaggtaacaccagcatctgcagcatcctcatcagaagctctccaggaaaagagaag

SEQ ID NO: 1588 - DNA, 80 bp, Artificial Sequence
  Description of Artificial Sequence: Synthetic oligonucleotide
  Description of Combined DNA/RNA Molecule: Synthetic oligonucleotide
aaacatggagccugtgtctgacgauaacggtacaaggctaaagcuutgctaacggucgagcttctctttucctggagagc

SEQ ID NO: 1589 - DNA, 20 bp, Artificial Sequence
  Description of Artificial Sequence: Synthetic primer
aaatgttaactatgaaaata

SEQ ID NO: 1590 - DNA, 20 bp, Artificial Sequence
  Description of Artificial Sequence: Synthetic primer
cacaggtaatcggctctaaa

SEQ ID NO: 1591 - DNA, 210 bp, Artificial Sequence
  Description of Artificial Sequence: Synthetic polynucleotide
tattttcatagttaacatttattgagcatctgttacattcactgaaaattgtaaagcctataattgtctcaaattttttgtgtatttacagtaacatggatattctcttagattttaactaatatgtaatataaaataattgtttcctaggcacaataaaagatcgaagattgtttatgcatcatgtttctttagagccgattacctgtg

SEQ ID NO: 1592 - DNA, 80 bp, Artificial Sequence
  Description of Artificial Sequence: Synthetic oligonucleotide
  Description of Combined DNA/RNA Molecule: Synthetic oligonucleotide
aaatgttaacuatgaaaataacgauaacggtacaaggctaaagcuutgctaacggucgagcacaggtaaucggctctaaa

SEQ ID NO: 1593 - DNA, 20 bp, Artificial Sequence
  Description of Artificial Sequence: Synthetic primer
gtaagcatcctggtgaggta

SEQ ID NO: 1594 - DNA, 20 bp, Artificial Sequence
  Description of Artificial Sequence: Synthetic primer
cacggcctctcaagcatttc

SEQ ID NO: 1595 - DNA, 210 bp, Artificial Sequence
  Description of Artificial Sequence: Synthetic polynucleotide
cacggcctctcaagcatttctccgccacccagatgtcgccgctacgagagccaaccgagattatgtgttcaaacaagtccaggaggccatcgccggcatctccaatgctgctcaagctacctcgcccactgacgaagccaagggccacacgggcatcggcgagctggctgcggctcttaatgagtttgacgtaagcatcctggtgaggta

SEQ ID NO: 1596 - DNA, 80 bp, Artificial Sequence
  Description of Artificial Sequence: Synthetic oligonucleotide
  Description of Combined DNA/RNA Molecule: Synthetic oligonucleotide
gtaagcatccuggtgaggtaacgauaacggtacaaggctaaagcuutgctaacggucgagcacggcctcucaagcatttc

SEQ ID NO: 1597 - DNA, 20 bp, Artificial Sequence
  Description of Artificial Sequence: Synthetic primer
cctaaaggcctacataatcg

SEQ ID NO: 1598 - DNA, 20 bp, Artificial Sequence
  Description of Artificial Sequence: Synthetic primer
ctttttcatcaaagtggtct

SEQ ID NO: 1599 - DNA, 210 bp, Artificial Sequence
  Description of Artificial Sequence: Synthetic polynucleotide
cgattatgtaggcctttaggtaagattttcacagagattgtgatcctgtgccctccataaattgactaactctatgcttcttttcataggctggttgaactcatggacctgatacttttctcttgagaagcaaaccagcccaaaagaaaaatggcgtttgttgcaacacagggggccacggtggttgaccagaccactttgatgaaaaag

SEQ ID NO: 1600 - DNA, 80 bp, Artificial Sequence
  Description of Artificial Sequence: Synthetic oligonucleotide
  Description of Combined DNA/RNA Molecule: Synthetic oligonucleotide
cctaaaggccuacataatcgacgauaacggtacaaggctaaagcuutgctaacggucgagctttttcaucaaagtggtct

SEQ ID NO: 1601 - DNA, 20 bp, Artificial Sequence
  Description of Artificial Sequence: Synthetic primer
ttaaaatatctgcttgccag

SEQ ID NO: 1602 - DNA, 20 bp, Artificial Sequence
  Description of Artificial Sequence: Synthetic primer
caccaaatacgatagatcag

SEQ ID NO: 1603 - DNA, 211 bp, Artificial Sequence
  Description of Artificial Sequence: Synthetic polynucleotide
ctggcaagcagatattttaaatgctatgccttattttacattaaggaaacatcctaggcaaaattatactaagcaaccccatataggtctttcaaaatatacccccctcccacaagatctctaagattcgacagagggcagaatattcacctggtttgttcagagaagctgtaaaggcctgttgtatcccactgatctatcgtatttggtg

SEQ ID NO: 1604 - DNA, 80 bp, Artificial Sequence
  Description of Artificial Sequence: Synthetic oligonucleotide
  Description of Combined DNA/RNA Molecule: Synthetic oligonucleotide
ttaaaatauctgcttgccagacgauaacggtacaaggctaaagcuutgctaacggucgagcaccaaauacgatagatcag

SEQ ID NO: 1605 - DNA, 20 bp, Artificial Sequence
  Description of Artificial Sequence: Synthetic primer
ttgcctattcgtttaaacag

SEQ ID NO: 1606 - DNA, 20 bp, Artificial Sequence
  Description of Artificial Sequence: Synthetic primer
cttcgagtccaagctgattc

SEQ ID NO: 1607 - DNA, 211 bp, Artificial Sequence
  Description of Artificial Sequence: Synthetic polynucleotide
ctgtttaaacgaataggcaatcatctcagagtattaatgatctttctatgttgtccactgagaatgatattttagacataggtatttcatttaaaaaattagcagagacaccatacaattctggtaaaagctttaagtagtataacttactttttgaaggaactcggagattggcaaggaccacttccagggaatcagcttggactcgaag

SEQ ID NO: 1608 - DNA, 80 bp, Artificial Sequence
  Description of Artificial Sequence: Synthetic oligonucleotide
  Description of Combined DNA/RNA Molecule: Synthetic oligonucleotide
ttgcctatucgtttaaacagacgauaacggtacaaggctaaagcuutgctaacggucgagcttcgaguccaagctgattc

SEQ ID NO: 1609 - DNA, 20 bp, Artificial Sequence
  Description of Artificial Sequence: Synthetic primer
ttggaacggggtctctccag

SEQ ID NO: 1610 - DNA, 20 bp, Artificial Sequence
  Description of Artificial Sequence: Synthetic primer
cctgggaacaacctactttg

SEQ ID NO: 1611 - DNA, 211 bp, Artificial Sequence
  Description of Artificial Sequence: Synthetic polynucleotide
ctggagagaccccgttccaagccattaaaacaaacaaaatcactcatcacgatttcaggcctatccaagcattttgcagatggcacttatggcattgttgatatcacagggtatgtttttgtttttcttcattttattttgctggtttagcctcaagcccaaggcagaagacctatctgcatttgagccctcaaagtaggttgttcccagg

SEQ ID NO: 1612 - DNA, 80 bp, Artificial Sequence
  Description of Artificial Sequence: Synthetic oligonucleotide
  Description of Combined DNA/RNA Molecule: Synthetic oligonucleotide
ttggaacgggguctctccagacgauaacggtacaaggctaaagcuutgctaacggucgagcctgggaacaaccuactttg

SEQ ID NO: 1613 - DNA, 20 bp, Artificial Sequence
  Description of Artificial Sequence: Synthetic primer
tttacatcaaatcttaaaac

SEQ ID NO: 1614 - DNA, 20 bp, Artificial Sequence
  Description of Artificial Sequence: Synthetic primer
ccacagatctgaggcaagta

SEQ ID NO: 1615 - DNA, 212 bp, Artificial Sequence
  Description of Artificial Sequence: Synthetic polynucleotide
ccacagatctgaggcaagtatggtttgactcgtttgccaagagcattaaccactgtgccaaagccgttcaacattactgagtcctaaaaaataaatttaaaaaaaagacatattcatttggtttatgactgcacagttgaaatacactaagagtcaaccttttctaaccacccaaacatctgttgctgtttttttacatcaaatcttaaaac

SEQ ID NO: 1616 - DNA, 80 bp, Artificial Sequence
  Description of Artificial Sequence: Synthetic oligonucleotide
  Description of Combined DNA/RNA Molecule: Synthetic oligonucleotide
tttacatcaaaucttaaaacacgauaacggtacaaggctaaagcuutgctaacggucgagccacagatcugaggcaagta

SEQ ID NO: 1617 - DNA, 20 bp, Artificial Sequence
  Description of Artificial Sequence: Synthetic primer
cactctccacacgggcctgt

SEQ ID NO: 1618 - DNA, 20 bp, Artificial Sequence
  Description of Artificial Sequence: Synthetic primer
ctcagagccgggctcgttga

SEQ ID NO: 1619 - DNA, 212 bp, Artificial Sequence
  Description of Artificial Sequence: Synthetic polynucleotide
acaggcccgtgtggagagtgcggagccagggatctggggatgctggcaggtgctgatcctgctcctgctctcagaagcaggtgttccttggtgtccccactctacccctgaggtcaccccgctgaccctgttctcctctgtgcccgtcaggaaccacgaaggcggaggaccggggcatgctgctgaaaaccttcaacgagcccggctctgag

SEQ ID NO: 1620 - DNA, 80 bp, Artificial Sequence
  Description of Artificial Sequence: Synthetic oligonucleotide
  Description of Combined DNA/RNA Molecule: Synthetic oligonucleotide
cactcuccacacgggcctgtacgauaacggtacaaggctaaagcuutgctaacggucgagctcagagccgggcucgttga

SEQ ID NO: 1621 - DNA, 20 bp, Artificial Sequence
  Description of Artificial Sequence: Synthetic primer
gcagtaagtgctgggggctc

SEQ ID NO: 1622 - DNA, 20 bp, Artificial Sequence
  Description of Artificial Sequence: Synthetic primer
ctgatgaaatgctttggaag

SEQ ID NO: 1623 - DNA, 212 bp, Artificial Sequence
  Description of Artificial Sequence: Synthetic polynucleotide
ctgatgaaatgctttggaaggcgtttctctcataggtgattgtggcaatgaaggaatggattcctgggcaacataaagaaaccatgacaaagaaaaataattcacaagcccggaaagcaattcttgttaagacaagaagctgagcagtatgactgaagaggatgggtgacctgaggggcagagggagagtcagcagtaagtgctgggggctc

SEQ ID NO: 1624 - DNA, 80 bp, Artificial Sequence
  Description of Artificial Sequence: Synthetic oligonucleotide
  Description of Combined DNA/RNA Molecule: Synthetic oligonucleotide
gcagtaagugctgggggctcacgauaacggtacaaggctaaagcuutgctaacggucgagctgatgaaaugctttggaag

SEQ ID NO: 1625 - DNA, 20 bp, Artificial Sequence
  Description of Artificial Sequence: Synthetic primer
aggcagccttgtaattatac

SEQ ID NO: 1626 - DNA, 20 bp, Artificial Sequence
  Description of Artificial Sequence: Synthetic primer
ccagaagtctgcaatgaaaa

SEQ ID NO: 1627 - DNA, 212 bp, Artificial Sequence
  Description of Artificial Sequence: Synthetic polynucleotide
gtataattacaaggctgcctatctattcaatacttggaggaaccaggggcttggtctgcaacccttctgccagacctaagagatcactagcttcaatttaacatcacattttgtaatacctagagagtattattaacatttgagcattacctccttcagcagtttgagccccagagaagagctgagctagagttttcattgcagacttctgg

SEQ ID NO: 1628 - DNA, 80 bp, Artificial Sequence
  Description of Artificial Sequence: Synthetic oligonucleotide
  Description of Combined DNA/RNA Molecule: Synthetic oligonucleotide
aggcagcctugtaattatacacgauaacggtacaaggctaaagcuutgctaacggucgagccagaagtcugcaatgaaaa

SEQ ID NO: 1629 - DNA, 20 bp, Artificial Sequence
  Description of Artificial Sequence: Synthetic primer
accacaaggatctccagaca

SEQ ID NO: 1630 - DNA, 20 bp, Artificial Sequence
  Description of Artificial Sequence: Synthetic primer
cggtccttgcaatgtcaaac

SEQ ID NO: 1631 - DNA, 212 bp, Artificial Sequence
  Description of Artificial Sequence: Synthetic polynucleotide
cggtccttgcaatgtcaaacttactcaatgccaacgtagacagtggtctcatgcactccataggtgagatcaaatgaaagtttcatatagaaatacaaaacctagagaactggcatgtaagagaagcaaaaattacttcagcaaggccatgttagtaaatttgcatctgtttgtccacattaggcttaggttaccacaaggatctccagaca

SEQ ID NO: 1632 - DNA, 80 bp, Artificial Sequence
  Description of Artificial Sequence: Synthetic oligonucleotide
  Description of Combined DNA/RNA Molecule: Synthetic oligonucleotide
accacaaggauctccagacaacgauaacggtacaaggctaaagcuutgctaacggucgagcggtcctugcaatgtcaaac

SEQ ID NO: 1633 - DNA, 20 bp, Artificial Sequence
  Description of Artificial Sequence: Synthetic primer
aggaagctaaccaatgagta

SEQ ID NO: 1634 - DNA, 20 bp, Artificial Sequence
  Description of Artificial Sequence: Synthetic primer
ctgtagactgattccaaagc

SEQ ID NO: 1635 - DNA, 212 bp, Artificial Sequence
  Description of Artificial Sequence: Synthetic polynucleotide
ctgtagactgattccaaagcggtattgccactgaactgaccgatctgaggtgaattttggtctggtccatccctatgagacaaggattgggaaaggaggagagatcaagattgattgtggaagtagttttgaaccgtatttaataaaagtattgcatatatttatattctaacgtatcaataataaagatgcaggaagctaaccaatgagta

SEQ ID NO: 1636 - DNA, 80 bp, Artificial Sequence
  Description of Artificial Sequence: Synthetic oligonucleotide
  Description of Combined DNA/RNA Molecule: Synthetic oligonucleotide
aggaagcuaaccaatgagtaacgauaacggtacaaggctaaagcuutgctaacggucgagctgtagacugattccaaagc

SEQ ID NO: 1637 - DNA, 20 bp, Artificial Sequence
  Description of Artificial Sequence: Synthetic primer
tcttagcaggcctcctggta

SEQ ID NO: 1638 - DNA, 20 bp, Artificial Sequence
  Description of Artificial Sequence: Synthetic primer
cacttgtaatttctggctca

SEQ ID NO: 1639 - DNA, 212 bp, Artificial Sequence
  Description of Artificial Sequence: Synthetic polynucleotide
cacttgtaatttctggctcagctccccattgaggaagatggggtaaaccccactcaaagtgtctccattcatcaaatgctgggcacagtcttggggatgagggaacacccggcctcctgcaaggaaaatagacaatgtccagaaaggattctttctctcacagtgcacaagagctccttggatcatagaaggtcttagcaggcctcctggta

SEQ ID NO: 1640 - DNA, 80 bp, Artificial Sequence
  Description of Artificial Sequence: Synthetic oligonucleotide
  Description of Combined DNA/RNA Molecule: Synthetic oligonucleotide
tcttagcaggccucctggtaacgauaacggtacaaggctaaagcuutgctaacggucgagcacttgtaauttctggctca

SEQ ID NO: 1641 - DNA, 20 bp, Artificial Sequence
  Description of Artificial Sequence: Synthetic primer
acctgtaatcccaacacttt

SEQ ID NO: 1642 - DNA, 20 bp, Artificial Sequence
  Description of Artificial Sequence: Synthetic primer
cgttccttctccttcttgac

SEQ ID NO: 1643 - DNA, 213 bp, Artificial Sequence
  Description of Artificial Sequence: Synthetic polynucleotide
cgttccttctccttcttgacacagcttaggacatggttcatggtatcttggagatactgggtatctgagcacagaaaagacaaagtagatagctccaggtcagggttagggtctacatatcaacagtcaaaggtcctataaagcaattcagtttaagaataaattaagaaagtggccaggcacagtggctcacacctgtaatcccaacacttt

SEQ ID NO: 1644 - DNA, 80 bp, Artificial Sequence
  Description of Artificial Sequence: Synthetic oligonucleotide
  Description of Combined DNA/RNA Molecule: Synthetic oligonucleotide
acctgtaaucccaacactttacgauaacggtacaaggctaaagcuutgctaacggucgagcgttccttcuccttcttgac

SEQ ID NO: 1645 - DNA, 20 bp, Artificial Sequence
  Description of Artificial Sequence: Synthetic primer
ttcttaagcctgatatagta

SEQ ID NO: 1646 - DNA, 20 bp, Artificial Sequence
  Description of Artificial Sequence: Synthetic primer
cactcacagatagaaaactt

SEQ ID NO: 1647 - DNA, 213 bp, Artificial Sequence
  Description of Artificial Sequence: Synthetic polynucleotide
cactcacagatagaaaacttgttgctgttgtctttccctggaaacaatttaaatcctctagatttaaaatctatggcctttttcactagttaagaaaacaaacaaaaacatgtatcaggaaatacaattttaaaatgaaattcaagttaacaaattttgttagcatggacttatgcaagataaagaaaccactttcttaagcctgatatagta

SEQ ID NO: 1648 - DNA, 80 bp, Artificial Sequence
  Description of Artificial Sequence: Synthetic oligonucleotide
  Description of Combined DNA/RNA Molecule: Synthetic oligonucleotide
ttcttaagccugatatagtaacgauaacggtacaaggctaaagcuutgctaacggucgagcactcacagauagaaaactt

SEQ ID NO: 1649 - DNA, 20 bp, Artificial Sequence
  Description of Artificial Sequence: Synthetic primer
aggggagtggagtaatattt

SEQ ID NO: 1650 - DNA, 20 bp, Artificial Sequence
  Description of Artificial Sequence: Synthetic primer
cgtgtcaatcaaggcatcaa

SEQ ID NO: 1651 - DNA, 213 bp, Artificial Sequence
  Description of Artificial Sequence: Synthetic polynucleotide
aaatattactccactccccttttttaatgataagtaatacaaaggaagaaaaatagtaaattaagtccaaacaaaattaatatttttggcttcagatggggatttacttaaaaaaaaggaactaaaataatttcctattttccattacagcaaacacaaattccagactatgctgagcttattgttaagtttcttgatgccttgattgacacg

SEQ ID NO: 1652 - DNA, 80 bp, Artificial Sequence
  Description of Artificial Sequence: Synthetic oligonucleotide
  Description of Combined DNA/RNA Molecule: Synthetic oligonucleotide
aggggaguggagtaatatttacgauaacggtacaaggctaaagcuutgctaacggucgagcgtgtcaaucaaggcatcaa

SEQ ID NO: 1653 - DNA, 20 bp, Artificial Sequence
  Description of Artificial Sequence: Synthetic primer
gtggcagttgtgaaagcttc

SEQ ID NO: 1654 - DNA, 20 bp, Artificial Sequence
  Description of Artificial Sequence: Synthetic primer
cagttttttgatgacagccc

SEQ ID NO: 1655 - DNA, 213 bp, Artificial Sequence
  Description of Artificial Sequence: Synthetic polynucleotide
cagttttttgatgacagcccaacaaggggctgggttagcaaaaggcttttaaagccatatacaggtaagagtcactactgccatgtgtgtgtgtttgtgtgtgtgtgtgtgtgtgtgagagaaacagacagacaggcagacttttttctatatgatgaaattaagtgtattttaccccagtaaattgcaaggggtggcagttgtgaaagcttc

SEQ ID NO: 1656 - DNA, 80 bp, Artificial Sequence
  Description of Artificial Sequence: Synthetic oligonucleotide
  Description of Combined DNA/RNA Molecule: Synthetic oligonucleotide
gtggcagtugtgaaagcttcacgauaacggtacaaggctaaagcuutgctaacggucgagcagtttttugatgacagccc

SEQ ID NO: 1657 - DNA, 20 bp, Artificial Sequence
  Description of Artificial Sequence: Synthetic primer
tacctcctagtaataacagg

SEQ ID NO: 1658 - DNA, 20 bp, Artificial Sequence
  Description of Artificial Sequence: Synthetic primer
caattcagagaatttggata

SEQ ID NO: 1659 - DNA, 214 bp, Artificial Sequence
  Description of Artificial Sequence: Synthetic polynucleotide
caattcagagaatttggataaaattccgggtaaccaggtgataagattgttccactaggccctctaacatctcctccacataatgctgaaatacaaagaaacagatccatgtgatcagcagtgagagagacagagggtgaacaaatctctatctcctctcttgaattgagcagtcgcattatctttgcttatgctacctcctagtaataacagg

SEQ ID NO: 1660 - DNA, 80 bp, Artificial Sequence
  Description of Artificial Sequence: Synthetic oligonucleotide
  Description of Combined DNA/RNA Molecule: Synthetic oligonucleotide
tacctcctaguaataacaggacgauaacggtacaaggctaaagcuutgctaacggucgagcaattcagagaauttggata

SEQ ID NO: 1661 - DNA, 20 bp, Artificial Sequence
  Description of Artificial Sequence: Synthetic primer
ccttcattagagacagagta

SEQ ID NO: 1662 - DNA, 20 bp, Artificial Sequence
  Description of Artificial Sequence: Synthetic primer
cacggggagcctggactccc

SEQ ID NO: 1663 - DNA, 214 bp, Artificial Sequence
  Description of Artificial Sequence: Synthetic polynucleotide
cacggggagcctggactcccctctgccgtggcttctcacctctccctccatgctgctgattcggaccagctcgttaaggatcaacaaggctccatggatccgatcatcccgattcatgcccttctctttggccaaggtctcatcaaatcccttctctgcttcttcaaatgtgtgctatgtagagagacagggtgccttcattagagacagagta

SEQ ID NO: 1664 - DNA, 80 bp, Artificial Sequence
  Description of Artificial Sequence: Synthetic oligonucleotide
  Description of Combined DNA/RNA Molecule: Synthetic oligonucleotide
ccttcatuagagacagagtaacgauaacggtacaaggctaaagcuutgctaacggucgagcacggggagccuggactccc

SEQ ID NO: 1665 - DNA, 20 bp, Artificial Sequence
  Description of Artificial Sequence: Synthetic primer
agctgaataagtttgatcac

SEQ ID NO: 1666 - DNA, 20 bp, Artificial Sequence
  Description of Artificial Sequence: Synthetic primer
ccagctccatctccagataa

SEQ ID NO: 1667 - DNA, 214 bp, Artificial Sequence
  Description of Artificial Sequence: Synthetic polynucleotide
ccagctccatctccagataagatatatttgagtgatccatctcctttatcttggtctgaatgtagctaggggaaataaaaaagagtatatccatgatcatgtataaaggtgcaggatgctgaaagaattcgcagaaggtctttcatgtctcatcactgagcaacggggtcggctatcctacttcttgaaatgagagctgaataagtttgatcac

SEQ ID NO: 1668 - DNA, 80 bp, Artificial Sequence
  Description of Artificial Sequence: Synthetic oligonucleotide
  Description of Combined DNA/RNA Molecule: Synthetic oligonucleotide
agctgaauaagtttgatcacacgauaacggtacaaggctaaagcuutgctaacggucgagccagctccauctccagataa

SEQ ID NO: 1669 - DNA, 20 bp, Artificial Sequence
  Description of Artificial Sequence: Synthetic primer
caaagatcattaactatttg

SEQ ID NO: 1670 - DNA, 20 bp, Artificial Sequence
  Description of Artificial Sequence: Synthetic primer
ccagtcctacaaagatggac

SEQ ID NO: 1671 - DNA, 215 bp, Artificial Sequence
  Description of Artificial Sequence: Synthetic polynucleotide
ccagtcctacaaagatggacttatcatatagtaagactgctaagcagtgcctggaggagatatctggtaagtgacctcatcgatgcataggtcaaacctaggaatttccgtattctctccataagactttttattaaatcatatatgtggtatactgtttttagtgcaaaaatggactatatacatctcatgcttcaaagatcattaactatttg

SEQ ID NO: 1672 - DNA, 80 bp, Artificial Sequence
  Description of Artificial Sequence: Synthetic oligonucleotide
  Description of Combined DNA/RNA Molecule: Synthetic oligonucleotide
caaagatcautaactatttgacgauaacggtacaaggctaaagcuutgctaacggucgagccagtccuacaaagatggac

SEQ ID NO: 1673 - DNA, 20 bp, Artificial Sequence
  Description of Artificial Sequence: Synthetic primer
aaatatgcccagtgacgcga

SEQ ID NO: 1674 - DNA, 20 bp, Artificial Sequence
  Description of Artificial Sequence: Synthetic primer
caccaagggcaatgcaggtc

SEQ ID NO: 1675 - DNA, 215 bp, Artificial Sequence
  Description of Artificial Sequence: Synthetic polynucleotide
tcgcgtcactgggcatatttaattaaagagaatatctctaatttgattttccgcttaaattttttaaactatttttagaagtgatatttaaacaaaatatcttgttatgcgtaaattggagatttgctttttttttttaattgtttttagtttctctataacaacaatacaaggcaacaaactgaagcaagagatgacctgcattgcccttggtg

SEQ ID NO: 1676 - DNA, 80 bp, Artificial Sequence
  Description of Artificial Sequence: Synthetic oligonucleotide
  Description of Combined DNA/RNA Molecule: Synthetic oligonucleotide
aaatatgcccagugacgcgaacgauaacggtacaaggctaaagcuutgctaacggucgagcaccaagggcaaugcaggtc

SEQ ID NO: 1677 - DNA, 20 bp, Artificial Sequence
  Description of Artificial Sequence: Synthetic primer
ttaaaaagcttttcagcagt

SEQ ID NO: 1678 - DNA, 20 bp, Artificial Sequence
  Description of Artificial Sequence: Synthetic primer
caccaaaattattttacata

SEQ ID NO: 1679 - DNA, 215 bp, Artificial Sequence
  Description of Artificial Sequence: Synthetic polynucleotide
caccaaaattattttacatatcaaaagaggcaaaggtattccataagtataccttgatagggagcactaaatccacggtatcgatgattgctgtctgtaacaaaatgcagtctgagccagtttttgttgctgataattggtggtggtatattcattccagataacctgaattacaaaagacaacaacaaaaaaatttaaaaagcttttcagcagt

SEQ ID NO: 1680 - DNA, 80 bp, Artificial Sequence
  Description of Artificial Sequence: Synthetic oligonucleotide
  Description of Combined DNA/RNA Molecule: Synthetic oligonucleotide
ttaaaaagcutttcagcagtacgauaacggtacaaggctaaagcuutgctaacggucgagcaccaaaatuattttacata

SEQ ID NO: 1681 - DNA, 20 bp, Artificial Sequence
  Description of Artificial Sequence: Synthetic primer
ttacagaaaggtgctcattt

SEQ ID NO: 1682 - DNA, 20 bp, Artificial Sequence
  Description of Artificial Sequence: Synthetic primer
ctctgattttacacgcttcc

SEQ ID NO: 1683 - DNA, 215 bp, Artificial Sequence
  Description of Artificial Sequence: Synthetic polynucleotide
ctctgattttacacgcttccgccaacaaactggtcccttctcagatttcttcccagtctggcccatgattattctaaaagcaatggtttcatattaaaatcactaatctaaccagcctgaatatgatcacctgtgttttaatccgcagcaaactaacaatcagtgaagaaatgacacatattacactgttggcatttacagaaaggtgctcattt

SEQ ID NO: 1684 - DNA, 80 bp, Artificial Sequence
  Description of Artificial Sequence: Synthetic oligonucleotide
  Description of Combined DNA/RNA Molecule: Synthetic oligonucleotide
ttacagaaaggugctcatttacgauaacggtacaaggctaaagcuutgctaacggucgagctctgatttuacacgcttcc

SEQ ID NO: 1685 - DNA, 20 bp, Artificial Sequence
  Description of Artificial Sequence: Synthetic primer
aatactttcaagtcactggc

SEQ ID NO: 1686 - DNA, 20 bp, Artificial Sequence
  Description of Artificial Sequence: Synthetic primer
caaactctgttctgcctttc

SEQ ID NO: 1687 - DNA, 215 bp, Artificial Sequence
  Description of Artificial Sequence: Synthetic polynucleotide
caaactctgttctgcctttcttgaactttgaggttgttcagaagtgtagccaatacatcatgagggctgaaaaaaacaaatgggtcaacaagctgttacattataagtcaaaaatttatggaagaaaaaaatgcataaagatgaaaacttttaagtattaataattacagggaactcagtaattttataaaatgcaatactttcaagtcactggc

SEQ ID NO: 1688 - DNA, 80 bp, Artificial Sequence
  Description of Artificial Sequence: Synthetic oligonucleotide
  Description of Combined DNA/RNA Molecule: Synthetic oligonucleotide
aatacttucaagtcactggcacgauaacggtacaaggctaaagcuutgctaacggucgagcaaactctgutctgcctttc

SEQ ID NO: 1689 - DNA, 20 bp, Artificial Sequence
  Description of Artificial Sequence: Synthetic primer
atcacataagttactcattt

SEQ ID NO: 1690 - DNA, 20 bp, Artificial Sequence
  Description of Artificial Sequence: Synthetic primer
ccaattggctgctagaatgg

SEQ ID NO: 1691 - DNA, 216 bp, Artificial Sequence
  Description of Artificial Sequence: Synthetic polynucleotide
ccaattggctgctagaatggggaccaagatgatgggaggcctaggatttcatgaagtcctcaataatgtaagtaaacctgaaaatcaaaccacaataattatttttattctattattactatatattatataaagtatatataccattccctctaagaaatggaaatacaaaattttgtattttttgtcttctcacatcacataagttactcattt

SEQ ID NO: 1692 - DNA, 80 bp, Artificial Sequence
  Description of Artificial Sequence: Synthetic oligonucleotide
  Description of Combined DNA/RNA Molecule: Synthetic oligonucleotide
atcacataagutactcatttacgauaacggtacaaggctaaagcuutgctaacggucgagccaattggcugctagaatgg

SEQ ID NO: 1693 - DNA, 20 bp, Artificial Sequence
  Description of Artificial Sequence: Synthetic primer
gctcgcggaaatagccggcc

SEQ ID NO: 1694 - DNA, 20 bp, Artificial Sequence
  Description of Artificial Sequence: Synthetic primer
ctcttcgacgcctgcctcct

SEQ ID NO: 1695 - DNA, 216 bp, Artificial Sequence
  Description of Artificial Sequence: Synthetic polynucleotide
ggccggctatttccgcgagcgcgttccatcctctaccgagcgcgcgcgaagactacggaggtcgactcgggagcgcgcacgcagctccgccccgcgtccgacccgcggatcccgcggcgtccggcccgggtggtctggatcgcggagggaatgccccggagggcggagaactgggacgaggccgaggtaggcgcggaggaggcaggcgtcgaagag

SEQ ID NO: 1696 - DNA, 80 bp, Artificial Sequence
  Description of Artificial Sequence: Synthetic oligonucleotide
  Description of Combined DNA/RNA Molecule: Synthetic oligonucleotide
gctcgcggaaauagccggccacgauaacggtacaaggctaaagcuutgctaacggucgagctcttcgacgccugcctcct

SEQ ID NO: 1697 - DNA, 20 bp, Artificial Sequence
  Description of Artificial Sequence: Synthetic primer
tcaaaatcaaaataaattaa

SEQ ID NO: 1698 - DNA, 20 bp, Artificial Sequence
  Description of Artificial Sequence: Synthetic primer
cctcatcccacagcagggct

SEQ ID NO: 1699 - DNA, 216 bp, Artificial Sequence
  Description of Artificial Sequence: Synthetic polynucleotide
cctcatcccacagcagggcttcttcagcagcccctccacgtcacggactcccctcctgagctctctggtatgaaatctctgtctctctctctctctcaagctgtgtctactcatttgaacaaattgaattttagggaaaataaccatctagtgaaactcacatggatatgaagtcaattttaaccaaatggtaaaatcaaaatcaaaataaattaa

SEQ ID NO: 1700 - DNA, 80 bp, Artificial Sequence
  Description of Artificial Sequence: Synthetic oligonucleotide
  Description of Combined DNA/RNA Molecule: Synthetic oligonucleotide
tcaaaaucaaaataaattaaacgauaacggtacaaggctaaagcuutgctaacggucgagcctcaucccacagcagggct

SEQ ID NO: 1701 - DNA, 20 bp, Artificial Sequence
  Description of Artificial Sequence: Synthetic primer
tgcttgtatatttatggaaa

SEQ ID NO: 1702 - DNA, 20 bp, Artificial Sequence
  Description of Artificial Sequence: Synthetic primer
ccacaaccgagcccctgtgg

SEQ ID NO: 1703 - DNA, 216 bp, Artificial Sequence
  Description of Artificial Sequence: Synthetic polynucleotide
ccacaaccgagcccctgtggagggtgatgagcaggcgggcatcctcctggccgagagcctcatccacgactgcaccttcatcaccaggtatgagccccgctgcccctcctcaggcctcagcatggggttaggggacctaccctacccgtcaccaccccgcaaaagagctgcccccagatgtgttcccgggagactgtgcttgtatatttatggaaa

SEQ ID NO: 1704 - DNA, 80 bp, Artificial Sequence
  Description of Artificial Sequence: Synthetic oligonucleotide
  Description of Combined DNA/RNA Molecule: Synthetic oligonucleotide
tgcttgtauatttatggaaaacgauaacggtacaaggctaaagcuutgctaacggucgagccacaaccgagccccugtgg

SEQ ID NO: 1705 - DNA, 20 bp, Artificial Sequence
  Description of Artificial Sequence: Synthetic primer
cactgtatgattccacttag

SEQ ID NO: 1706 - DNA, 20 bp, Artificial Sequence
  Description of Artificial Sequence: Synthetic primer
cagcggacacttgctcctgg

SEQ ID NO: 1707 - DNA, 216 bp, Artificial Sequence
  Description of Artificial Sequence: Synthetic polynucleotide
cagcggacacttgctcctggcgcacattatcgccaaattcgccatacacaagaagatcgtcctgcaggtattttgcaagcccctcctgtccgccgacatcagcgtgaatctcacatggtgcacttggctccctggtgcagtctcagcctctcctgttgtcttctcccaaaaccaataaaaaccatgaaaacacagacactgtatgattccacttag

SEQ ID NO: 1708 - DNA, 80 bp, Artificial Sequence
  Description of Artificial Sequence: Synthetic oligonucleotide
  Description of Combined DNA/RNA Molecule: Synthetic oligonucleotide
cactgtatgautccacttagacgauaacggtacaaggctaaagcuutgctaacggucgagcagcggacacutgctcctgg

SEQ ID NO: 1709 - DNA, 20 bp, Artificial Sequence
  Description of Artificial Sequence: Synthetic primer
gtgctataaccctgaatgta

SEQ ID NO: 1710 - DNA, 20 bp, Artificial Sequence
  Description of Artificial Sequence: Synthetic primer
cagcttgtcctattggaaga

SEQ ID NO: 1711 - DNA, 216 bp, Artificial Sequence
  Description of Artificial Sequence: Synthetic polynucleotide
cagcttgtcctattggaagatatcctcatgctgtctctttttctgctttggtagttgatggacagtggcaagagtggagttcgtggagccagtgctcagtaacgtgctcgaatgggactcagcagagaagccggcagtgcactgcagctgcccatggaggctccgaatgcagagggccatgggcagaaagcagagagtgctataaccctgaatgta

SEQ ID NO: 1712 - DNA, 80 bp, Artificial Sequence
  Description of Artificial Sequence: Synthetic oligonucleotide
  Description of Combined DNA/RNA Molecule: Synthetic oligonucleotide
gtgctauaaccctgaatgtaacgauaacggtacaaggctaaagcuutgctaacggucgagcagcttgtccuattggaaga

SEQ ID NO: 1713 - DNA, 20 bp, Artificial Sequence
  Description of Artificial Sequence: Synthetic primer
tgtaacacgttaatactgat

SEQ ID NO: 1714 - DNA, 20 bp, Artificial Sequence
  Description of Artificial Sequence: Synthetic primer
ctctttgagtgttcacattg

SEQ ID NO: 1715 - DNA, 217 bp, Artificial Sequence
  Description of Artificial Sequence: Synthetic polynucleotide
atcagtattaacgtgttacatatgtgaaaaaaaggagaaccaagctatatctgaacaaaaattccgtggttttatatttgagtctatcgagtgtgtgcatatgtgtatgttgagtgtatacattagtatatacctacttttttcttttagatctatgttcgaacaggtatctaccatggaggagaacccttatgtgacaatgtgaacactcaaagag

SEQ ID NO: 1716 - DNA, 80 bp, Artificial Sequence
  Description of Artificial Sequence: Synthetic oligonucleotide
  Description of Combined DNA/RNA Molecule: Synthetic oligonucleotide
tgtaacacgutaatactgatacgauaacggtacaaggctaaagcuutgctaacggucgagctctttgagugttcacattg

SEQ ID NO: 1717 - DNA, 20 bp, Artificial Sequence
  Description of Artificial Sequence: Synthetic primer
ctcactgcagccttgacctc

SEQ ID NO: 1718 - DNA, 20 bp, Artificial Sequence
  Description of Artificial Sequence: Synthetic primer
cacgaagccgccccacacgt

SEQ ID NO: 1719 - DNA, 217 bp, Artificial Sequence
  Description of Artificial Sequence: Synthetic polynucleotide
gaggtcaaggctgcagtgagctatgattgcagctcttcactccagcctgggcgacagagcaagaccctgtctaagaaaaaggttattcagggtggggccccgggagtttctagcccttccctacaaccggccaccatgcccctctcgcaggttttgggaccctggcccagccgcggaccccctgaccgacctgcgctacgtgtggggcggcttcgtg

SEQ ID NO: 1720 - DNA, 80 bp, Artificial Sequence
  Description of Artificial Sequence: Synthetic oligonucleotide
  Description of Combined DNA/RNA Molecule: Synthetic oligonucleotide
ctcactgcagccutgacctcacgauaacggtacaaggctaaagcuutgctaacggucgagcacgaagccgccccacacgu

SEQ ID NO: 1721 - DNA, 20 bp, Artificial Sequence
  Description of Artificial Sequence: Synthetic primer
aaaattaatgtttttcccaa

SEQ ID NO: 1722 - DNA, 20 bp, Artificial Sequence
  Description of Artificial Sequence: Synthetic primer
ctgccacacaatcaagttga

SEQ ID NO: 1723 - DNA, 217 bp, Artificial Sequence
  Description of Artificial Sequence: Synthetic polynucleotide
ttgggaaaaacattaattttaaaaaattactacttgtaagatctgtgtgaaatttctaccttctgaaaatatgaattcttctcgttaaaattttctgggactctatttcctgctgttcactaaagtgtgtatttatgctcttaattatagaaagagtattcaaacgaaaatgcagttgtgaagagaatgcagtctcttcaacttgattgtgtggcag

SEQ ID NO: 1724 - DNA, 80 bp, Artificial Sequence
  Description of Artificial Sequence: Synthetic oligonucleotide
  Description of Combined DNA/RNA Molecule: Synthetic oligonucleotide
aaaattaaugtttttcccaaacgauaacggtacaaggctaaagcuutgctaacggucgagctgccacacaaucaagttga

SEQ ID NO: 1725 - DNA, 20 bp, Artificial Sequence
  Description of Artificial Sequence: Synthetic primer
tactaacataaacatcatag

SEQ ID NO: 1726 - DNA, 20 bp, Artificial Sequence
  Description of Artificial Sequence: Synthetic primer
cttcttcatccaagagaaca

SEQ ID NO: 1727 - DNA, 217 bp, Artificial Sequence
  Description of Artificial Sequence: Synthetic polynucleotide
ctatgatgtttatgttagtattttaagtatctactaaagaaagctgttgaattttagaagtaacattgaaatagttaggtgaagtgattatccaggtgtttgatcacgttaattccctatcttgctgcagaaactcagaggatttcctcatcacaacagcacccacatttacgtaaagtttcagtgtctgaatcaaatgttctcttggatgaagaag

SEQ ID NO: 1728 - DNA, 80 bp, Artificial Sequence
  Description of Artificial Sequence: Synthetic oligonucleotide
  Description of Combined DNA/RNA Molecule: Synthetic oligonucleotide
tactaacauaaacatcatagacgauaacggtacaaggctaaagcuutgctaacggucgagcttcttcauccaagagaaca

SEQ ID NO: 1729 - DNA, 20 bp, Artificial Sequence
  Description of Artificial Sequence: Synthetic primer
tgcttcccacccaaccctgc

SEQ ID NO: 1730 - DNA, 20 bp, Artificial Sequence
  Description of Artificial Sequence: Synthetic primer
cctggcccccgatggtcagg

SEQ ID NO: 1731 - DNA, 218 bp, Artificial Sequence
  Description of Artificial Sequence: Synthetic polynucleotide
gcagggttgggtgggaagcagcattgaggggccaccgtgccagccctgggaggagggtggttaaaccggtgggaaccccggtatgggggactggggtggccaacctaaggtcaggacccacctccaccggcacctgctccatgtccccagcattgagattgaccagaagctgcaggagatcatgaagcagacgggctacctgaccatcgggggccagg

SEQ ID NO: 1732 - DNA, 80 bp, Artificial Sequence
  Description of Artificial Sequence: Synthetic oligonucleotide
  Description of Combined DNA/RNA Molecule: Synthetic oligonucleotide
tgctucccacccaaccctgcacgauaacggtacaaggctaaagcuutgctaacggucgagcctggcccccgauggtcagg

SEQ ID NO: 1733 - DNA, 20 bp, Artificial Sequence
  Description of Artificial Sequence: Synthetic primer
ttgaggggccttctgacctg

SEQ ID NO: 1734 - DNA, 20 bp, Artificial Sequence
  Description of Artificial Sequence: Synthetic primer
ccaccagaggatgtgcgggc

SEQ ID NO: 1735 - DNA, 218 bp, Artificial Sequence
  Description of Artificial Sequence: Synthetic polynucleotide
ccaccagaggatgtgcgggcctggagaacagccctagtgccccgcccacctgaggaactggctgaaggccttgtagttggtcagcgtgtggtaatcctcctccgagaacaggtagtccacgtcgtccaggccccactcggccatgagctgccccgaggacttgggctcctacagagacccaggccagaggtagagttgttgaggggccttctgacctg

SEQ ID NO: 1736 - DNA, 80 bp, Artificial Sequence
  Description of Artificial Sequence: Synthetic oligonucleotide
  Description of Combined DNA/RNA Molecule: Synthetic oligonucleotide
ttgaggggccutctgacctgacgauaacggtacaaggctaaagcuutgctaacggucgagccaccagaggaugtgcgggc

SEQ ID NO: 1737 - DNA, 20 bp, Artificial Sequence
  Description of Artificial Sequence: Synthetic primer
ttctatcccacaaatatgcg

SEQ ID NO: 1738 - DNA, 20 bp, Artificial Sequence
  Description of Artificial Sequence: Synthetic primer
cctttgggtaattggtttag

SEQ ID NO: 1739 - DNA, 218 bp, Artificial Sequence
  Description of Artificial Sequence: Synthetic polynucleotide
cgcatatttgtgggatagaaatatctaggaaattatttttcaaggactctattcctatgactaacaatgctgttgctgtttagcatgatattttaaattctagcttatgtagaacaataaatcatgctatttttttgtttcttctttcaggggtagaagaaaatagtttggacagttttgtttttgatacgctgattcctaaaccaattacccaaagg

SEQ ID NO: 1740 - DNA, 80 bp, Artificial Sequence
  Description of Artificial Sequence: Synthetic oligonucleotide
  Description of Combined DNA/RNA Molecule: Synthetic oligonucleotide
ttctaucccacaaatatgcgacgauaacggtacaaggctaaagcuutgctaacggucgagcctttggguaattggtttag

SEQ ID NO: 1741 - DNA, 20 bp, Artificial Sequence
  Description of Artificial Sequence: Synthetic primer
ggtcccggggtcgcttccct

SEQ ID NO: 1742 - DNA, 20 bp, Artificial Sequence
  Description of Artificial Sequence: Synthetic primer
catggcggtgtccaccaggc

SEQ ID NO: 1743 - DNA, 218 bp, Artificial Sequence
  Description of Artificial Sequence: Synthetic polynucleotide
agggaagcgaccccgggacctggctgcctgcctgtcccggaagccacgtgggcatcaccgcagcaagatgggcttgaggaacaaagcaacactgtcagtgaatcgctgaactgtcattgcgctttgactgtgtgacattctgttccgtaggaaagcctgaggagtctcgtgtctctagcgtcttggaggaaagcaagcgcctggtggacaccgccatg

SEQ ID NO: 1744 - DNA, 80 bp, Artificial Sequence
  Description of Artificial Sequence: Synthetic oligonucleotide
  Description of Combined DNA/RNA Molecule: Synthetic oligonucleotide
ggtcccggggucgcttccctacgauaacggtacaaggctaaagcuutgctaacggucgagcatggcggugtccaccaggc

SEQ ID NO: 1745 - DNA, 20 bp, Artificial Sequence
  Description of Artificial Sequence: Synthetic primer
ttttcacatagaaccgctgt

SEQ ID NO: 1746 - DNA, 20 bp, Artificial Sequence
  Description of Artificial Sequence: Synthetic primer
cagaatgtgcagggctgatt

SEQ ID NO: 1747 - DNA, 218 bp, Artificial Sequence
  Description of Artificial Sequence: Synthetic polynucleotide
cagaatgtgcagggctgattgtcttcttttaaggtaaaatatatggagcaggtataataaactcctattcgtgcatttctgtaggtatatggtgctacctatctacaaaaactcctggatcctttattacgaattgtgatcacatcctctgattggcaacatgttagctttgaagtggatcctaccaggtttgtcatcttttcacatagaaccgctgt

SEQ ID NO: 1748 - DNA, 80 bp, Artificial Sequence
  Description of Artificial Sequence: Synthetic oligonucleotide
  Description of Combined DNA/RNA Molecule: Synthetic oligonucleotide
ttttcacauagaaccgctgtacgauaacggtacaaggctaaagcuutgctaacggucgagcagaatgugcagggctgatt

SEQ ID NO: 1749 - DNA, 20 bp, Artificial Sequence
  Description of Artificial Sequence: Synthetic primer
gccccatgccagcccgcagc

SEQ ID NO: 1750 - DNA, 20 bp, Artificial Sequence
  Description of Artificial Sequence: Synthetic primer
cgtggacccgcaaggccgga

SEQ ID NO: 1751 - DNA, 218 bp, Artificial Sequence
  Description of Artificial Sequence: Synthetic polynucleotide
gctgcgggctggcatggggcccacctctcccgatgctctgtgactactcaactaagggactggaagacaaaccaaagcaaaatcgaacacatgctgactgtcggtgggaaaagcagcaacagggatatgcaacagaaaacatatacatactacaggcgacaggagccgcaggccacatgagctcctgcgcgcgtgccctccggccttgcgggtccacg

SEQ ID NO: 1752 - DNA, 80 bp, Artificial Sequence
  Description of Artificial Sequence: Synthetic oligonucleotide
  Description of Combined DNA/RNA Molecule: Synthetic oligonucleotide
gccccaugccagcccgcagcacgauaacggtacaaggctaaagcuutgctaacggucgagcguggacccgcaaggccgga

SEQ ID NO: 1753 - DNA, 20 bp, Artificial Sequence
  Description of Artificial Sequence: Synthetic primer
atgccatgactactttgcta

SEQ ID NO: 1754 - DNA, 20 bp, Artificial Sequence
  Description of Artificial Sequence: Synthetic primer
ccttaacatgatgttatctg

SEQ ID NO: 1755 - DNA, 219 bp, Artificial Sequence
  Description of Artificial Sequence: Synthetic polynucleotide
ccttaacatgatgttatctgtatttacctatagtctaaattataccatctataatgtgcttaatttttagggttcaactacacgaatggaccatgaaacagccagtgttttgagttctagtagcacacactctgcacctcgaaggctgacaagtcatctgggaaccaaggtaacagaagattacaaaccctggtcactaatgccatgactactttgcta

SEQ ID NO: 1756 - DNA, 80 bp, Artificial Sequence
  Description of Artificial Sequence: Synthetic oligonucleotide
  Description of Combined DNA/RNA Molecule: Synthetic oligonucleotide
atgccatgacuactttgctaacgauaacggtacaaggctaaagcuutgctaacggucgagccttaacaugatgttatctg

SEQ ID NO: 1757 - DNA, 20 bp, Artificial Sequence
  Description of Artificial Sequence: Synthetic primer
ctttctccattgtagttttc

SEQ ID NO: 1758 - DNA, 20 bp, Artificial Sequence
  Description of Artificial Sequence: Synthetic primer
caaaccaaagacagcttatt

SEQ ID NO: 1759 - DNA, 219 bp, Artificial Sequence
  Description of Artificial Sequence: Synthetic polynucleotide
gaaaactacaatggagaaagaagactaaaaaaaccaaattaaattactcacctatctcccaggcctaaaatatacccaaccattgacatgaccgctaaagaacgggtataattggttcttcggtcaaaccacacctagaacacaggagtgcatgtgaactacggttctggaaactttaatttcaacataattatactctaataagctgtctttggtttg

SEQ ID NO: 1760 - DNA, 80 bp, Artificial Sequence
  Description of Artificial Sequence: Synthetic oligonucleotide
  Description of Combined DNA/RNA Molecule: Synthetic oligonucleotide
ctttctccautgtagttttcacgauaacggtacaaggctaaagcuutgctaacggucgagcaaaccaaagacagcutatt

SEQ ID NO: 1761 - DNA, 20 bp, Artificial Sequence
  Description of Artificial Sequence: Synthetic primer
ccatgatacggcaccctact

SEQ ID NO: 1762 - DNA, 20 bp, Artificial Sequence
  Description of Artificial Sequence: Synthetic primer
catgcccagctgacccccca

SEQ ID NO: 1763 - DNA, 219 bp, Artificial Sequence
  Description of Artificial Sequence: Synthetic polynucleotide
catgcccagctgaccccccaggacggccatgtcttccatctccagaatcttcccagcaatcaggaacaggatgcccacaggtgcatacctgtgtgagggagccacatacctgtcagggctccctcctgacctcccttgcaggtctgaaggtggcatccccaaggctttgcccatatagggccctggagccacacaatacccatgatacggcaccctact

SEQ ID NO: 1764 - DNA, 80 bp, Artificial Sequence
  Description of Artificial Sequence: Synthetic oligonucleotide
  Description of Combined DNA/RNA Molecule: Synthetic oligonucleotide
ccatgauacggcaccctactacgauaacggtacaaggctaaagcuutgctaacggucgagcatgcccagcugacccccca

SEQ ID NO: 1765 - DNA, 20 bp, Artificial Sequence
  Description of Artificial Sequence: Synthetic primer
gaaaaatatggatagtaaca

SEQ ID NO: 1766 - DNA, 20 bp, Artificial Sequence
  Description of Artificial Sequence: Synthetic primer
ccaggagaagaccaagacat

SEQ ID NO: 1767 - DNA, 219 bp, Artificial Sequence
  Description of Artificial Sequence: Synthetic polynucleotide
tgttactatccatatttttcagctactttgaactttttcttttgctttctatatcttggctctctttcagctcattctctaattagaatcattaccaaaatatagctttggctgtaactaaatgggcacaagtaaaataacatccaatacctctatgagtaacaactgcaagctctttagttctttctatctgttcagcatgtcttggtcttctcctgg

SEQ ID NO: 1768 - DNA, 80 bp, Artificial Sequence
  Description of Artificial Sequence: Synthetic oligonucleotide
  Description of Combined DNA/RNA Molecule: Synthetic oligonucleotide
gaaaaatauggatagtaacaacgauaacggtacaaggctaaagcuutgctaacggucgagccaggagaagaccaagacau

SEQ ID NO: 1769 - DNA, 20 bp, Artificial Sequence
  Description of Artificial Sequence: Synthetic primer
cagtttttgggactataggc

SEQ ID NO: 1770 - DNA, 20 bp, Artificial Sequence
  Description of Artificial Sequence: Synthetic primer
cctcaagctgttcaagctgg

SEQ ID NO: 1771 - DNA, 219 bp, Artificial Sequence
  Description of Artificial Sequence: Synthetic polynucleotide
cctcaagctgttcaagctggtctttggctctgtctccctctttgcagctgaaaatgaacaaatgctgaaggtaaagtccatttaatctaagtagtgcttctgttcagggttttttattgttgttagagacagggcctcacggtggtgtccaggctggtcagcgttctggactcaagcaatccacctgccttgatctccccagtttttgggactataggc

SEQ ID NO: 1772 - DNA, 80 bp, Artificial Sequence
  Description of Artificial Sequence: Synthetic oligonucleotide
  Description of Combined DNA/RNA Molecule: Synthetic oligonucleotide
cagttttugggactataggcacgauaacggtacaaggctaaagcuutgctaacggucgagcctcaagcugttcaagctgg

SEQ ID NO: 1773 - DNA, 20 bp, Artificial Sequence
  Description of Artificial Sequence: Synthetic primer
ctcaaggccgtcagtgctcc

SEQ ID NO: 1774 - DNA, 20 bp, Artificial Sequence
  Description of Artificial Sequence: Synthetic primer
catcctggggtccaggccaa

SEQ ID NO: 1775 - DNA, 219 bp, Artificial Sequence
  Description of Artificial Sequence: Synthetic polynucleotide
ggagcactgacggccttgagcccagtttctgcctttgtcaaatggggataatgacccagccacacccctcccagggttgttgtgaggctggaaaggtggttcccaagagggtggttcccagaattgttgatgagactgtttctcctgcagctgtgtggacctggatgacaagggctgccccgccgagcagagagccaggttggcctggaccccaggatg

SEQ ID NO: 1776 - DNA, 80 bp, Artificial Sequence
  Description of Artificial Sequence: Synthetic oligonucleotide
  Description of Combined DNA/RNA Molecule: Synthetic oligonucleotide
ctcaaggccgucagtgctccacgauaacggtacaaggctaaagcuutgctaacggucgagcatcctgggguccaggccaa

SEQ ID NO: 1777 - DNA, 20 bp, Artificial Sequence
  Description of Artificial Sequence: Synthetic primer
aatatatcttgtttagatct

SEQ ID NO: 1778 - DNA, 20 bp, Artificial Sequence
  Description of Artificial Sequence: Synthetic primer
ccactacgatggaaagtgga

SEQ ID NO: 1779 - DNA, 220 bp, Artificial Sequence
  Description of Artificial Sequence: Synthetic polynucleotide
ccactacgatggaaagtggacatcggaggaagactggaattgatgtctgctgaggagtgtgatggatagctctatagcaagaagcagaaaaaggtggccatatttaatcataaggtatttagtgagttattttcaaatacttttctcacaactctctattttacaatggagacagcttttagaatttcaaaatagccaagaatatatcttgtttagatct

SEQ ID NO: 1780 - DNA, 80 bp, Artificial Sequence
  Description of Artificial Sequence: Synthetic oligonucleotide
  Description of Combined DNA/RNA Molecule: Synthetic oligonucleotide
aatatatctugtttagatctacgauaacggtacaaggctaaagcuutgctaacggucgagccactacgauggaaagtgga

SEQ ID NO: 1781 - DNA, 20 bp, Artificial Sequence
  Description of Artificial Sequence: Synthetic primer
tcaattatgagtgatgttag

SEQ ID NO: 1782 - DNA, 20 bp, Artificial Sequence
  Description of Artificial Sequence: Synthetic primer
cacccacaaaaggtgaattt

SEQ ID NO: 1783 - DNA, 220 bp, Artificial Sequence
  Description of Artificial Sequence: Synthetic polynucleotide
ctaacatcactcataattgagaggtaatatttttgttctcttcttattcaggcaacataagctttacaacaaggagttgtatgctgacttcattgctgctcagattaaaacattgtcatttttagcttacattatcaggatttaccaggtaaggtcattgacttttatgtcaggtttattgagatagtttacatacaataaaattcaccttttgtgggtg

SEQ ID NO: 1784 - DNA, 80 bp, Artificial Sequence
  Description of Artificial Sequence: Synthetic oligonucleotide
  Description of Combined DNA/RNA Molecule: Synthetic oligonucleotide
tcaattaugagtgatgttagacgauaacggtacaaggctaaagcuutgctaacggucgagcacccacaaaaggugaattt

SEQ ID NO: 1785 - DNA, 20 bp, Artificial Sequence
  Description of Artificial Sequence: Synthetic primer
tcttagcttattatacagga

SEQ ID NO: 1786 - DNA, 20 bp, Artificial Sequence
  Description of Artificial Sequence: Synthetic primer
cattcaaactcaatatccat

SEQ ID NO: 1787 - DNA, 220 bp, Artificial Sequence
  Description of Artificial Sequence: Synthetic polynucleotide
tcctgtataataagctaagagcttagggaatgatttgaattataaatattttctatcccagagcagtgttttaaactcagtgaagacctcagcagcatgcaagttcacatccccacccactcactcacttttttttttctgtctttgcagttccgccatggtttttaaatcatccttccaacctgtatgcctatgaaagcatggatattgagtttgaatg

SEQ ID NO: 1788 - DNA, 80 bp, Artificial Sequence
  Description of Artificial Sequence: Synthetic oligonucleotide
  Description of Combined DNA/RNA Molecule: Synthetic oligonucleotide
tcttagctuattatacaggaacgauaacggtacaaggctaaagcuutgctaacggucgagcattcaaacucaatatccat

SEQ ID NO: 1789 - DNA, 20 bp, Artificial Sequence
  Description of Artificial Sequence: Synthetic primer
ttttaaagtcagctccacta

SEQ ID NO: 1790 - DNA, 20 bp, Artificial Sequence
  Description of Artificial Sequence: Synthetic primer
cgacacttacccaaagtaag

SEQ ID NO: 1791 - DNA, 220 bp, Artificial Sequence
  Description of Artificial Sequence: Synthetic polynucleotide
cgacacttacccaaagtaagcaaaaattttagtctttcagaaatatccaagctctgaaataattttcttccctaaataaaatgagaaaagaaatttctattaatatttacatgttttttctaggaaggcatttttctccccttatagctgaaactgattttatcaggcatctttatttatctccaaaagttttaatggatttttaaagtcagctccacta

SEQ ID NO: 1792 - DNA, 80 bp, Artificial Sequence
  Description of Artificial Sequence: Synthetic oligonucleotide
  Description of Combined DNA/RNA Molecule: Synthetic oligonucleotide
ttttaaagucagctccactaacgauaacggtacaaggctaaagcuutgctaacggucgagcgacactuacccaaagtaag

SEQ ID NO: 1793 - DNA, 20 bp, Artificial Sequence
  Description of Artificial Sequence: Synthetic primer
ttccaaggtgattttaagta

SEQ ID NO: 1794 - DNA, 20 bp, Artificial Sequence
  Description of Artificial Sequence: Synthetic primer
ccgcaagctcttcgacctgg

SEQ ID NO: 1795 - DNA, 221 bp, Artificial Sequence
  Description of Artificial Sequence: Synthetic polynucleotide
ccgcaagctcttcgacctggcgctgcagggcctgcagctgttgtcgcagtggagcgcgcacgtgatggaagtggtaggccccgtccccgaccccagccccgctccaaagctgcctcgggcactttattcacattaacttttggtctttgggctttttatctttggccctagaaagacgagaatatctatcagtagatatgtttccaaggtgattttaagta

SEQ ID NO: 1796 - DNA, 80 bp, Artificial Sequence
  Description of Artificial Sequence: Synthetic oligonucleotide
  Description of Combined DNA/RNA Molecule: Synthetic oligonucleotide
ttccaaggugattttaagtaacgauaacggtacaaggctaaagcuutgctaacggucgagccgcaagcucttcgacctgg

SEQ ID NO: 1797 - DNA, 20 bp, Artificial Sequence
  Description of Artificial Sequence: Synthetic primer
gctgccccagattagtatga

SEQ ID NO: 1798 - DNA, 20 bp, Artificial Sequence
  Description of Artificial Sequence: Synthetic primer
ccagacgccaacgatgctgc

SEQ ID NO: 1799 - DNA, 221 bp, Artificial Sequence
  Description of Artificial Sequence: Synthetic polynucleotide
tcatactaatctggggcagccaaggcttagccccgccagcctgtgaacctctcacagtgcccacagccatgccctcctccgtccaggggctgacaggtgggaggggtagccctgcctcagggagtggacttacctggcctctctgctcagagatcatcaattatgaatttgacaccaaggacctggtgtgcctgggcctgagcagcatcgttggcgtctgg

SEQ ID NO: 1800 - DNA, 80 bp, Artificial Sequence
  Description of Artificial Sequence: Synthetic oligonucleotide
  Description of Combined DNA/RNA Molecule: Synthetic oligonucleotide
gctgccccagautagtatgaacgauaacggtacaaggctaaagcuutgctaacggucgagccagacgccaacgaugctgc

SEQ ID NO: 1801 - DNA, 20 bp, Artificial Sequence
  Description of Artificial Sequence: Synthetic primer
ggccattttttaaatgcgta

SEQ ID NO: 1802 - DNA, 20 bp, Artificial Sequence
  Description of Artificial Sequence: Synthetic primer
ctgagaagtcattttggatg

SEQ ID NO: 1803 - DNA, 221 bp, Artificial Sequence
  Description of Artificial Sequence: Synthetic polynucleotide
ctgagaagtcattttggatgcattataaattgagactgttagagattggctttggtgctagtgccatcttttatttcctttcaggaaatctatcctccaaagttgcaccagtttgcgtatgtgacagatggagcttgttcaggagatgaaattctcaccatggaattaatgattatgaaggtgggttccagtgaattttccggccattttttaaatgcgta

SEQ ID NO: 1804 - DNA, 80 bp, Artificial Sequence
  Description of Artificial Sequence: Synthetic oligonucleotide
  Description of Combined DNA/RNA Molecule: Synthetic oligonucleotide
ggccattttutaaatgcgtaacgauaacggtacaaggctaaagcuutgctaacggucgagctgagaagucattttggatg

SEQ ID NO: 1805 - DNA, 20 bp, Artificial Sequence
  Description of Artificial Sequence: Synthetic primer
taggtaagacaatgtaaaac

SEQ ID NO: 1806 - DNA, 20 bp, Artificial Sequence
  Description of Artificial Sequence: Synthetic primer
ctgtatttatgttgctattg

SEQ ID NO: 1807 - DNA, 221 bp, Artificial Sequence
  Description of Artificial Sequence: Synthetic polynucleotide
gttttacattgtcttacctactgatttgtattaaaaagttcagcccattaggaagtaattaaaatatgccttcattaagtagaagctattctacaatcagcagcaatgggacttaagataatagcaatgggactaaatttcttttaatacctgcatctgtaagtctcttcaccaactgggcaacagtggatctcttttgaccaatagcaacataaatacag

SEQ ID NO: 1808 - DNA, 80 bp, Artificial Sequence
  Description of Artificial Sequence: Synthetic oligonucleotide
  Description of Combined DNA/RNA Molecule: Synthetic oligonucleotide
taggtaagacaaugtaaaacacgauaacggtacaaggctaaagcuutgctaacggucgagctgtatttaugttgctattg

SEQ ID NO: 1809 - DNA, 20 bp, Artificial Sequence
  Description of Artificial Sequence: Synthetic primer
tcaatagatacacaactatg

SEQ ID NO: 1810 - DNA, 20 bp, Artificial Sequence
  Description of Artificial Sequence: Synthetic primer
cttgtttttacagatgttat

SEQ ID NO: 1811 - DNA, 222 bp, Artificial Sequence
  Description of Artificial Sequence: Synthetic polynucleotide
cttgtttttacagatgttatttgaacttactctttgggataaactctggtaatcccaccatcagtcacaacaaatcgtgctttcactcccttgctgaaacagaagacaaaacaaggaaatgttctattgaacatattctaaaaaacaaagttaggtgttggtgatacaaagagaagtaagtttaggaagtaaaggaaatatatcaatagatacacaactatg

SEQ ID NO: 1812 - DNA, 80 bp, Artificial Sequence
  Description of Artificial Sequence: Synthetic oligonucleotide
  Description of Combined DNA/RNA Molecule: Synthetic oligonucleotide
tcaatagauacacaactatgacgauaacggtacaaggctaaagcuutgctaacggucgagcttgttttuacagatgttat

SEQ ID NO: 1813 - DNA, 20 bp, Artificial Sequence
  Description of Artificial Sequence: Synthetic primer
ctttagcatttcaaacacat

SEQ ID NO: 1814 - DNA, 20 bp, Artificial Sequence
  Description of Artificial Sequence: Synthetic primer
cttcaaatcagattctaatc

SEQ ID NO: 1815 - DNA, 222 bp, Artificial Sequence
  Description of Artificial Sequence: Synthetic polynucleotide
atgtgtttgaaatgctaaagttactgtgattataaaatttctaaattttaataccttttcaatcattggttaaatatatattacattcacttttttccaggacaaattaaacagtagcaaatgaaataggaactctcagataataccaaccgtgataactgagcacaaaaaagccacttgttgtgaaatcactgtggaatttgattagaatctgatttgaag

SEQ ID NO: 1816 - DNA, 80 bp, Artificial Sequence
  Description of Artificial Sequence: Synthetic oligonucleotide
  Description of Combined DNA/RNA Molecule: Synthetic oligonucleotide
ctttagcatutcaaacacatacgauaacggtacaaggctaaagcuutgctaacggucgagcttcaaaucagattctaatc

SEQ ID NO: 1817 - DNA, 20 bp, Artificial Sequence
  Description of Artificial Sequence: Synthetic primer
ttactagatgaagatataaa

SEQ ID NO: 1818 - DNA, 20 bp, Artificial Sequence
  Description of Artificial Sequence: Synthetic primer
ctttgatcacactaagctgg

SEQ ID NO: 1819 - DNA, 222 bp, Artificial Sequence
  Description of Artificial Sequence: Synthetic polynucleotide
tttatatcttcatctagtaagtgcggcgtagactgagaaataataacttaccagtcttttgaagatgagtgttagaggcatggaagttccttgcagcaatgaaagatgaacccaaagcatttctggagacctagtgcaaaagtattcttaaaaatttgatttttaacaaagcctttataaaacttacaagcttaaacaaatgccagcttagtgtgatcaaag

SEQ ID NO: 1820 - DNA, 80 bp, Artificial Sequence
  Description of Artificial Sequence: Synthetic oligonucleotide
  Description of Combined DNA/RNA Molecule: Synthetic oligonucleotide
ttactagaugaagatataaaacgauaacggtacaaggctaaagcuutgctaacggucgagctttgaucacactaagctgg

SEQ ID NO: 1821 - DNA, 20 bp, Artificial Sequence
  Description of Artificial Sequence: Synthetic primer
taaagtggtcatataaacca

SEQ ID NO: 1822 - DNA, 20 bp, Artificial Sequence
  Description of Artificial Sequence: Synthetic primer
ctgaagcaactgcattcaga

SEQ ID NO: 1823 - DNA, 222 bp, Artificial Sequence
  Description of Artificial Sequence: Synthetic polynucleotide
ctgaagcaactgcattcagagtctttaatgggatgacttgtgttggaaaatccaagtcactggtcaccgaacactaaaacagaaaaaataaaattgactcttaagaataaaaggacaaccttaagctgtagccatcatattgtaaagagatgctgcctacccaaatatttaattttgaaaaaaaagtccttacctaggacagtaaagtggtcatataaacca

SEQ ID NO: 1824 - DNA, 80 bp, Artificial Sequence
  Description of Artificial Sequence: Synthetic oligonucleotide
  Description of Combined DNA/RNA Molecule: Synthetic oligonucleotide
taaagtggucatataaaccaacgauaacggtacaaggctaaagcuutgctaacggucgagctgaagcaacugcattcaga

SEQ ID NO: 1825 - DNA, 20 bp, Artificial Sequence
  Description of Artificial Sequence: Synthetic primer
gggagagctgagtcacattt

SEQ ID NO: 1826 - DNA, 20 bp, Artificial Sequence
  Description of Artificial Sequence: Synthetic primer
cagtcatagatcttgtcttc

SEQ ID NO: 1827 - DNA, 222 bp, Artificial Sequence
  Description of Artificial Sequence: Synthetic polynucleotide
cagtcatagatcttgtcttcttgtccatgggcagagaaaatatgctgctgcaacttgtttgcttgaacaaatactgaaatgataaaagaatgatgaacttgggttattttgtttccgaaatgccctcagtcgatgactctgcatgaacagacagcaggccggacagcacgcctcccaggtgtgacttactgcctgagacctggggagagctgagtcacattt

SEQ ID NO: 1828 - DNA, 80 bp, Artificial Sequence
  Description of Artificial Sequence: Synthetic oligonucleotide
  Description of Combined DNA/RNA Molecule: Synthetic oligonucleotide
gggagagcugagtcacatttacgauaacggtacaaggctaaagcuutgctaacggucgagcagtcatagaucttgtcttc

SEQ ID NO: 1829 - DNA, 20 bp, Artificial Sequence
  Description of Artificial Sequence: Synthetic primer
ggaggctgaaccctggaggc

SEQ ID NO: 1830 - DNA, 20 bp, Artificial Sequence
  Description of Artificial Sequence: Synthetic primer
ctgagaccagtgcccgaggg

SEQ ID NO: 1831 - DNA, 222 bp, Artificial Sequence
  Description of Artificial Sequence: Synthetic polynucleotide
gcctccagggttcagcctcccgctcacctcctgctttgccaccctccacagctcgccaaggagagcgagcggctgcaggccatgatggcccacctgcacatgcggccctcggagcccaagcccttcagccagccagtgagtgctgctcccctccccgcccctcccagagccttccacagaccctggagcctcgggacccccaccctcgggcactggtctcag

SEQ ID NO: 1832 - DNA, 80 bp, Artificial Sequence
  Description of Artificial Sequence: Synthetic oligonucleotide
  Description of Combined DNA/RNA Molecule: Synthetic oligonucleotide
ggaggcugaaccctggaggcacgauaacggtacaaggctaaagcuutgctaacggucgagctgagaccagugcccgaggg

SEQ ID NO: 1833 - DNA, 20 bp, Artificial Sequence
  Description of Artificial Sequence: Synthetic primer
gcccagctttcttggcagta

SEQ ID NO: 1834 - DNA, 20 bp, Artificial Sequence
  Description of Artificial Sequence: Synthetic primer
cttttaatgccatttaatac

SEQ ID NO: 1835 - DNA, 222 bp, Artificial Sequence
  Description of Artificial Sequence: Synthetic polynucleotide
cttttaatgccatttaatactagtcaaaaaaaatcactagtcaaagtcactaatgaacaacacaccaaaacattctactcattaattgttggtagtttctattttgcaaacctatttattacctgttctagctgtttctgaaccatgctttgctgttcagtaacatgcttgagttgttctgcatcttcctctggaaattcacgcccagctttcttggcagta

SEQ ID NO: 1836 - DNA, 80 bp, Artificial Sequence
  Description of Artificial Sequence: Synthetic oligonucleotide
  Description of Combined DNA/RNA Molecule: Synthetic oligonucleotide
gcccagcttucttggcagtaacgauaacggtacaaggctaaagcuutgctaacggucgagcttttaaugccatttaatac

SEQ ID NO: 1837 - DNA, 20 bp, Artificial Sequence
  Description of Artificial Sequence: Synthetic primer
tcattagggaacgggagata

SEQ ID NO: 1838 - DNA, 20 bp, Artificial Sequence
  Description of Artificial Sequence: Synthetic primer
cagaacgtgttcccctccat

SEQ ID NO: 1839 - DNA, 222 bp, Artificial Sequence
  Description of Artificial Sequence: Synthetic polynucleotide
tatctcccgttccctaatgagaagatatctgtaataactttggatctcaaacatggttttcacatttttaaaaagtgtttgtgtctcaaggggcagctggtgagtggtgcctcctccttggcttccccaggtcctgcaggatatggtcccccctaagaagcacctgctccgacaccagcctgccaacgcacagattggcctgatggaggggaacacgttctg

SEQ ID NO: 1840 - DNA, 80 bp, Artificial Sequence
  Description of Artificial Sequence: Synthetic oligonucleotide
  Description of Combined DNA/RNA Molecule: Synthetic oligonucleotide
tcatuagggaacgggagataacgauaacggtacaaggctaaagcuutgctaacggucgagcagaacgtgutcccctccat

SEQ ID NO: 1841 - DNA, 20 bp, Artificial Sequence
  Description of Artificial Sequence: Synthetic primer
tctattgcagcaaagagccc

SEQ ID NO: 1842 - DNA, 20 bp, Artificial Sequence
  Description of Artificial Sequence: Synthetic primer
ccatggtgccgcgctttacc

SEQ ID NO: 1843 - DNA, 222 bp, Artificial Sequence
  Description of Artificial Sequence: Synthetic polynucleotide
gggctctttgctgcaatagaggtggcagaaataccacctggtcatcagagttttgcaataaaaacagtaattgtccattcacagatctttaggatggccagtctctaagcctcttgtctacccacctgcctctccgtgtctgtcttccaggtgagacgatgcggatcgcctcctccgagtttgcagatgacccttgctcgtcggtaaagcgcggcaccatgg

SEQ ID NO: 1844 - DNA, 80 bp, Artificial Sequence
  Description of Artificial Sequence: Synthetic oligonucleotide
  Description of Combined DNA/RNA Molecule: Synthetic oligonucleotide
tctatugcagcaaagagcccacgauaacggtacaaggctaaagcuutgctaacggucgagccatggugccgcgctttacc

SEQ ID NO: 1845 - DNA, 20 bp, Artificial Sequence
  Description of Artificial Sequence: Synthetic primer
taattcaagacctcagactt

SEQ ID NO: 1846 - DNA, 20 bp, Artificial Sequence
  Description of Artificial Sequence: Synthetic primer
catggcttctggcttcaggt

SEQ ID NO: 1847 - DNA, 223 bp, Artificial Sequence
  Description of Artificial Sequence: Synthetic polynucleotide
aagtctgaggtcttgaattatgtcccagagtcaacattagatgagtgagcaaccttttggttcacctcactactcttgcacatcaaatacagattttggctgaaggtattctttttggaataatctttctctgcaactttgatttctcagggaacgagcattgaatacaacacagcctgggtcccttcagctcactgtgggaaacctgaagccagaagccatg

SEQ ID NO: 1848 - DNA, 80 bp, Artificial Sequence
  Description of Artificial Sequence: Synthetic oligonucleotide
  Description of Combined DNA/RNA Molecule: Synthetic oligonucleotide
taattcaagaccucagacttacgauaacggtacaaggctaaagcuutgctaacggucgagcatggcttcuggcttcaggt

SEQ ID NO: 1849 - DNA, 20 bp, Artificial Sequence
  Description of Artificial Sequence: Synthetic primer
ttctagatttcaaacatgtt

SEQ ID NO: 1850 - DNA, 20 bp, Artificial Sequence
  Description of Artificial Sequence: Synthetic primer
ctgcccaagagaaattatca

SEQ ID NO: 1851 - DNA, 223 bp, Artificial Sequence
  Description of Artificial Sequence: Synthetic polynucleotide
ctgcccaagagaaattatcagtctcatgaagctctgctgggaagcgaatccggaagctcggccgacatttcctggtaagagcatcttttctgactgtgtaggatgcatcctgtgtggtgattttcctagtaacatattgttaggaacttggtttgaatcctcagaaaactgagttcgacttgacttgtggttttaaactgattttctagatttcaaacatgtt

SEQ ID NO: 1852 - DNA, 80 bp, Artificial Sequence
  Description of Artificial Sequence: Synthetic oligonucleotide
  Description of Combined DNA/RNA Molecule: Synthetic oligonucleotide
ttctagattucaaacatgttacgauaacggtacaaggctaaagcuutgctaacggucgagctgcccaagagaaautatca

SEQ ID NO: 1853 - DNA, 20 bp, Artificial Sequence
  Description of Artificial Sequence: Synthetic primer
ctaaagattttaagtatcaa

SEQ ID NO: 1854 - DNA, 20 bp, Artificial Sequence
  Description of Artificial Sequence: Synthetic primer
cgagtgacggaaggctttta

SEQ ID NO: 1855 - DNA, 223 bp, Artificial Sequence
  Description of Artificial Sequence: Synthetic polynucleotide
ttgatacttaaaatctttaggatttgagcttagtttgtcagttgttaattgtgttgcagtgtgtggaagattgctgtgttctgttatttgcaaggttattatgtcttcacaggaagagtgggctaaatgaaattgttttatcttttgcagctgttgaatttgtgtgaggctgaagattcagctttaacaaagctgccctgttataaaagccttccgtcactcg

SEQ ID NO: 1856 - DNA, 80 bp, Artificial Sequence
  Description of Artificial Sequence: Synthetic oligonucleotide
  Description of Combined DNA/RNA Molecule: Synthetic oligonucleotide
ctaaagattutaagtatcaaacgauaacggtacaaggctaaagcuutgctaacggucgagcgagtgacggaaggcuttta

SEQ ID NO: 1857 - DNA, 20 bp, Artificial Sequence
  Description of Artificial Sequence: Synthetic primer
gcttattagactggaatggt

SEQ ID NO: 1858 - DNA, 20 bp, Artificial Sequence
  Description of Artificial Sequence: Synthetic primer
cctttgttgagttcacttga

SEQ ID NO: 1859 - DNA, 223 bp, Artificial Sequence
  Description of Artificial Sequence: Synthetic polynucleotide
accattccagtctaataagctatgggattgccgtggtctctctccaaaggcaggccctttggaaatctcctctaatgcttctaacagcctataaattactatatttaatattgcccttgtctttctcccttcccttctttttcttttcagaaacagagctgtcagtcagtgctgaattagtgcctacctcatcatggaacatctcaagtgaactcaacaaagg

SEQ ID NO: 1860 - DNA, 80 bp, Artificial Sequence
  Description of Artificial Sequence: Synthetic oligonucleotide
  Description of Combined DNA/RNA Molecule: Synthetic oligonucleotide
gcttattagacuggaatggtacgauaacggtacaaggctaaagcuutgctaacggucgagcctttgtugagttcacttga

SEQ ID NO: 1861 - DNA, 20 bp, Artificial Sequence
  Description of Artificial Sequence: Synthetic primer
acttagcctcctcacataac

SEQ ID NO: 1862 - DNA, 20 bp, Artificial Sequence
  Description of Artificial Sequence: Synthetic primer
catgggctttctttgacctc

SEQ ID NO: 1863 - DNA, 223 bp, Artificial Sequence
  Description of Artificial Sequence: Synthetic polynucleotide
gttatgtgaggaggctaagtgatgtgcattcatgatttagtattgaaatcccatgatttaataaacacggagatttagaaattatgagataacatgacatttctagacagttttgcaaagaagttttacagtttctcttttatatttaaggtgactacacttgtcaacacaagcaacaaaggcccatctggtaaaaagaaagggaggtcaaagaaagcccatg

SEQ ID NO: 1864 - DNA, 80 bp, Artificial Sequence
  Description of Artificial Sequence: Synthetic oligonucleotide
  Description of Combined DNA/RNA Molecule: Synthetic oligonucleotide
acttagccucctcacataacacgauaacggtacaaggctaaagcuutgctaacggucgagcatgggcttuctttgacctc

SEQ ID NO: 1865 - DNA, 20 bp, Artificial Sequence
  Description of Artificial Sequence: Synthetic primer
ggtggagctgcccagccgta

SEQ ID NO: 1866 - DNA, 20 bp, Artificial Sequence
  Description of Artificial Sequence: Synthetic primer
cctgccaggtctgaccagtg

SEQ ID NO: 1867 - DNA, 223 bp, Artificial Sequence
  Description of Artificial Sequence: Synthetic polynucleotide
cctgccaggtctgaccagtgatgggctgcagtgtggcaaaggcctggaggacaggggtgaagctgcgtctgtgggtcagagtgaggaggggccttcactgcaatgctgttgccacccccaggcctccggaatgccccccgctgctgggcagtgatccagcccctgctgtgtgccgtatacatgcccaagtgtgagaatgaccgggtggagctgcccagccgta

SEQ ID NO: 1868 - DNA, 80 bp, Artificial Sequence
  Description of Artificial Sequence: Synthetic oligonucleotide
  Description of Combined DNA/RNA Molecule: Synthetic oligonucleotide
ggtggagcugcccagccgtaacgauaacggtacaaggctaaagcuutgctaacggucgagcctgccagguctgaccagtg

SEQ ID NO: 1869 - DNA, 20 bp, Artificial Sequence
  Description of Artificial Sequence: Synthetic primer
tccactctccagagctggta

SEQ ID NO: 1870 - DNA, 20 bp, Artificial Sequence
  Description of Artificial Sequence: Synthetic primer
ctttttaacaaactatttca

SEQ ID NO: 1871 - DNA, 223 bp, Artificial Sequence
  Description of Artificial Sequence: Synthetic polynucleotide
ctttttaacaaactatttcagataatcataatgtaacaagtttaatatgcactgtctcttttaggactggatctgccatttatgatgatgcctcatcccctacttccagtcagcttacctcctgcatcagttgccatggcaatgaatcagatgaaccatctcaatactattgccaacatggctgctgcagcacagattcacagtccactctccagagctggta

SEQ ID NO: 1872 - DNA, 80 bp, Artificial Sequence
  Description of Artificial Sequence: Synthetic oligonucleotide
  Description of Combined DNA/RNA Molecule: Synthetic oligonucleotide
tccactcuccagagctggtaacgauaacggtacaaggctaaagcuutgctaacggucgagcttttuaacaaactatttca

SEQ ID NO: 1873 - DNA, 20 bp, Artificial Sequence
  Description of Artificial Sequence: Synthetic primer
aagggggtttccttagctgc

SEQ ID NO: 1874 - DNA, 20 bp, Artificial Sequence
  Description of Artificial Sequence: Synthetic primer
ccacgttgcttgtgtctcgc

SEQ ID NO: 1875 - DNA, 223 bp, Artificial Sequence
  Description of Artificial Sequence: Synthetic polynucleotide
ccacgttgcttgtgtctcgctccgagtagtagccctggtccaggatccagtcaaacacctccctccccgtggccctgagggacaccagcccctgagcctggcgtgggcagaatcaggggtagggcaggagcacttgggtgagctgcctacgccaggcagctggctgagcaaggcacagggacctgggacgccaagggtccagaaagggggtttccttagctgc

SEQ ID NO: 1876 - DNA, 80 bp, Artificial Sequence
  Description of Artificial Sequence: Synthetic oligonucleotide
  Description of Combined DNA/RNA Molecule: Synthetic oligonucleotide
aagggggttuccttagctgcacgauaacggtacaaggctaaagcuutgctaacggucgagccacgttgcutgtgtctcgc

SEQ ID NO: 1877 - DNA, 20 bp, Artificial Sequence
  Description of Artificial Sequence: Synthetic primer
tggggtagagtccgtcctta

SEQ ID NO: 1878 - DNA, 20 bp, Artificial Sequence
  Description of Artificial Sequence: Synthetic primer
cgtggaatttgaggtgaagc

SEQ ID NO: 1879 - DNA, 223 bp, Artificial Sequence
  Description of Artificial Sequence: Synthetic polynucleotide
taaggacggactctaccccatctcacagcctggaatcctagctcttctaaccagcttttttaaggaatgagcctcagaaggaagcaaaagacccccccatgacaccatcgttccccaagcctggctgtgctcctccctgtagacactcacagctgcatgtctccggccctcattgcggtcagcacccagccattccagggctcgcttcacctcaaattccacg

SEQ ID NO: 1880 - DNA, 80 bp, Artificial Sequence
  Description of Artificial Sequence: Synthetic oligonucleotide
  Description of Combined DNA/RNA Molecule: Synthetic oligonucleotide
tggggtagaguccgtccttaacgauaacggtacaaggctaaagcuutgctaacggucgagcgtggaattugaggtgaagc

SEQ ID NO: 1881 - DNA, 20 bp, Artificial Sequence
  Description of Artificial Sequence: Synthetic primer
taatcagttaatttctattt

SEQ ID NO: 1882 - DNA, 20 bp, Artificial Sequence
  Description of Artificial Sequence: Synthetic primer
cacatttgtccattggactt

SEQ ID NO: 1883 - DNA, 224 bp, Artificial Sequence
  Description of Artificial Sequence: Synthetic polynucleotide
cacatttgtccattggacttgcttagctttgtctcctgctaaaaccattggtcttcccaaaacatccaaatattcctgtttatgggaaaaaaaaaaaaagtcgtggttaaaactaggaatgctgtgttgaaataaaaattacagagaaaaaatattctagagttaaaaatgaatatagaatcaaaattattgacactgaatatataatcagttaatttctattt

SEQ ID NO: 1884 - DNA, 80 bp, Artificial Sequence
  Description of Artificial Sequence: Synthetic oligonucleotide
  Description of Combined DNA/RNA Molecule: Synthetic oligonucleotide
taatcagtuaatttctatttacgauaacggtacaaggctaaagcuutgctaacggucgagcacatttguccattggactt

SEQ ID NO: 1885 - DNA, 20 bp, Artificial Sequence
  Description of Artificial Sequence: Synthetic primer
tgacagtatgtgtcttgtag

SEQ ID NO: 1886 - DNA, 20 bp, Artificial Sequence
  Description of Artificial Sequence: Synthetic primer
ccccctgggaatggcatcta

SEQ ID NO: 1887 - DNA, 224 bp, Artificial Sequence
  Description of Artificial Sequence: Synthetic polynucleotide
ctacaagacacatactgtcaccctcagttactcacatcaattcaaatatcagatgacaatttgtaacagaggattgtgatatatttttattccaaccttgttttactgtgtatataattgaataaatcaataacaatagtcctgacttaccatacagtaatgaaatcatatattggttctgtttgaaggacagtaaaattgatgtagatgccattcccaggggg

SEQ ID NO: 1888 - DNA, 80 bp, Artificial Sequence
  Description of Artificial Sequence: Synthetic oligonucleotide
  Description of Combined DNA/RNA Molecule: Synthetic oligonucleotide
tgacagtaugtgtcttgtagacgauaacggtacaaggctaaagcuutgctaacggucgagccccctgggaauggcatcta

SEQ ID NO: 1889 - DNA, 20 bp, Artificial Sequence
  Description of Artificial Sequence: Synthetic primer
cctgctaaacacagtaaaag

SEQ ID NO: 1890 - DNA, 20 bp, Artificial Sequence
  Description of Artificial Sequence: Synthetic primer
cctacaatccccacagtccc

SEQ ID NO: 1891 - DNA, 224 bp, Artificial Sequence
  Description of Artificial Sequence: Synthetic polynucleotide
cttttactgtgtttagcaggctgtctgcgttgttactttggatctgaaggaaagaactatttcattatttgtaatatttcatctgtgaaaagaaaaatacttaggcaaatgaatctacattttaataatgttatttttatgttattttagccttacgaaggatgaatccaaaaggccaaagtataaagagcttctggtgagtgtgggactgtggggattgtagg

SEQ ID NO: 1892 - DNA, 80 bp, Artificial Sequence
  Description of Artificial Sequence: Synthetic oligonucleotide
  Description of Combined DNA/RNA Molecule: Synthetic oligonucleotide
cctgcuaaacacagtaaaagacgauaacggtacaaggctaaagcuutgctaacggucgagcctacaauccccacagtccc

SEQ ID NO: 1893 - DNA, 20 bp, Artificial Sequence
  Description of Artificial Sequence: Synthetic primer
gggaggaagaatacagaggt

SEQ ID NO: 1894 - DNA, 20 bp, Artificial Sequence
  Description of Artificial Sequence: Synthetic primer
cagtgaacggtgtgtaagtt

SEQ ID NO: 1895 - DNA, 224 bp, Artificial Sequence
  Description of Artificial Sequence: Synthetic polynucleotide
acctctgtattcttcctccccccttgtctttttctctattttttctcttctccccaaatctctccctctcttccattccctcccatcccttccccttcccccctcttctccccgtcgtcctctctccgcccttgctgtctgtgaaatcaggacttcccggggttaagtgacgattattatggagcaaagaacctgagtaagtccaacttacacaccgttcactg

SEQ ID NO: 1896 - DNA, 80 bp, Artificial Sequence
  Description of Artificial Sequence: Synthetic oligonucleotide
  Description of Combined DNA/RNA Molecule: Synthetic oligonucleotide
gggaggaagaauacagaggtacgauaacggtacaaggctaaagcuutgctaacggucgagcagtgaacggugtgtaagtt

SEQ ID NO: 1897 - DNA, 20 bp, Artificial Sequence
  Description of Artificial Sequence: Synthetic primer
caactaaacctacgactccc

SEQ ID NO: 1898 - DNA, 20 bp, Artificial Sequence
  Description of Artificial Sequence: Synthetic primer
catacatagtaggtggctag

SEQ ID NO: 1899 - DNA, 224 bp, Artificial Sequence
  Description of Artificial Sequence: Synthetic polynucleotide
gggagtcgtaggtttagttgttatcttcgactcgtgctgtccctttttcaggaatgtaagaagcacttggcaggcttgggggctttggggctgggcagcctgatcactgaactcacggcaaatgaagaattgaccgggactgacggtgccttggtaaatgatgaaggtgaagtctgggttgtggggagtaggcgggggaggaggctagccacctactatgtatg

SEQ ID NO: 1900 - DNA, 80 bp, Artificial Sequence
  Description of Artificial Sequence: Synthetic oligonucleotide
  Description of Combined DNA/RNA Molecule: Synthetic oligonucleotide
caactaaaccuacgactcccacgauaacggtacaaggctaaagcuutgctaacggucgagcatacataguaggtggctag

SEQ ID NO: 1901 - DNA, 20 bp, Artificial Sequence
  Description of Artificial Sequence: Synthetic primer
ccgtcattgggttctctgta

SEQ ID NO: 1902 - DNA, 20 bp, Artificial Sequence
  Description of Artificial Sequence: Synthetic primer
cctgcccatgcttatggatc

SEQ ID NO: 1903 - DNA, 224 bp, Artificial Sequence
  Description of Artificial Sequence: Synthetic polynucleotide
cctgcccatgcttatggatcccttggtgtctgcactcaatgggtctcagacattggtcagccaaggcctcaggacgctggagctgtgtgtggacaacctgcagcccgacttcctctacgaccacatccagccggtgcgcgcagagctcatgcaggtaggattttagtgaggttgttagctggctgcttccctggaagcagtgggccgtcattgggttctctgta

SEQ ID NO: 1904 - DNA, 80 bp, Artificial Sequence
  Description of Artificial Sequence: Synthetic oligonucleotide
  Description of Combined DNA/RNA Molecule: Synthetic oligonucleotide
ccgtcatugggttctctgtaacgauaacggtacaaggctaaagcuutgctaacggucgagcctgcccaugcttatggatc

SEQ ID NO: 1905 - DNA, 20 bp, Artificial Sequence
  Description of Artificial Sequence: Synthetic primer
tttaataaatgtatcatgga

SEQ ID NO: 1906 - DNA, 20 bp, Artificial Sequence
  Description of Artificial Sequence: Synthetic primer
cattcctgatcttcctcgtg

SEQ ID NO: 1907 - DNA, 225 bp, Artificial Sequence
  Description of Artificial Sequence: Synthetic polynucleotide
cattcctgatcttcctcgtgctgctcgactttgcctttccatttgctctgttaaaggccgaaagggtgctaaagaggtaaagtatttcagaaggaacaattatgtttacctttaaaaactcctgattataccgctgattgaattttttcacaaattggatgttattttatatttaagaaaataataataaacctatttttaaaattttaataaatgtatcatgga

SEQ ID NO: 1908 - DNA, 80 bp, Artificial Sequence
  Description of Artificial Sequence: Synthetic oligonucleotide
  Description of Combined DNA/RNA Molecule: Synthetic oligonucleotide
tttaataaaugtatcatggaacgauaacggtacaaggctaaagcuutgctaacggucgagcattcctgaucttcctcgtg

SEQ ID NO: 1909 - DNA, 20 bp, Artificial Sequence
  Description of Artificial Sequence: Synthetic primer
ttattaatcattaatgtata

SEQ ID NO: 1910 - DNA, 20 bp, Artificial Sequence
  Description of Artificial Sequence: Synthetic primer
ccaaatctgtgttctcacta

SEQ ID NO: 1911 - DNA, 225 bp, Artificial Sequence
  Description of Artificial Sequence: Synthetic polynucleotide
tatacattaatgattaataacaagataaatttcaggacaagatttgagacaacatgatgttgtctcaaatgttgattcttctttcctacttgaaaaattttgttagattacattaagggcagtggtttgtttgccactaccatcacttaccttcgtaatataccttaaatccatgagcactaactgcaaaatcactggtcaaacgtagtgagaacacagatttgg

SEQ ID NO: 1912 - DNA, 80 bp, Artificial Sequence
  Description of Artificial Sequence: Synthetic oligonucleotide
  Description of Combined DNA/RNA Molecule: Synthetic oligonucleotide
ttattaatcautaatgtataacgauaacggtacaaggctaaagcuutgctaacggucgagccaaatctgugttctcacta

SEQ ID NO: 1913 - DNA, 20 bp, Artificial Sequence
  Description of Artificial Sequence: Synthetic primer
tctgcactgcatttaaggag

SEQ ID NO: 1914 - DNA, 20 bp, Artificial Sequence
  Description of Artificial Sequence: Synthetic primer
cacggtgcctgccgtccagg

SEQ ID NO: 1915 - DNA, 225 bp, Artificial Sequence
  Description of Artificial Sequence: Synthetic polynucleotide
ctccttaaatgcagtgcagaaaaaaggcacatacatcgatcttgggtgtcctgatcagggtcaggaagggaaagaggacttttacgtgtgacttctaggtcttgccattaacatggcctaccagagttgcatccttcccttctctgatacctgagtgtatcctggaggttgttgcctcgtgacaaggagatggaacggaagaagccctggacggcaggcaccgtg

SEQ ID NO: 1916 - DNA, 80 bp, Artificial Sequence
  Description of Artificial Sequence: Synthetic oligonucleotide
  Description of Combined DNA/RNA Molecule: Synthetic oligonucleotide
tctgcacugcatttaaggagacgauaacggtacaaggctaaagcuutgctaacggucgagcacggtgccugccgtccagg

SEQ ID NO: 1917 - DNA, 20 bp, Artificial Sequence
  Description of Artificial Sequence: Synthetic primer
ttttatttgaccctaacaac

SEQ ID NO: 1918 - DNA, 20 bp, Artificial Sequence
  Description of Artificial Sequence: Synthetic primer
cttcaaatcaactctggcta

SEQ ID NO: 1919 - DNA, 225 bp, Artificial Sequence
  Description of Artificial Sequence: Synthetic polynucleotide
gttgttagggtcaaataaaattatatatgtagaaaggagctgtaaattaataatcaaatattggatatcatttcaatttgtgcaatgtaattatttaatatacatgcagcaccccagtgtttggccattttactcttctaaaatacttactggtatacacaagttgaaagccttcatctgtcccttcagtatcggaattaaattctagccagagttgatttgaag

SEQ ID NO: 1920 - DNA, 80 bp, Artificial Sequence
  Description of Artificial Sequence: Synthetic oligonucleotide
  Description of Combined DNA/RNA Molecule: Synthetic oligonucleotide
ttttattugaccctaacaacacgauaacggtacaaggctaaagcuutgctaacggucgagcttcaaaucaactctggcta

SEQ ID NO: 1921 - DNA, 20 bp, Artificial Sequence
  Description of Artificial Sequence: Synthetic primer
aggcctttgcatatactctt

SEQ ID NO: 1922 - DNA, 20 bp, Artificial Sequence
  Description of Artificial Sequence: Synthetic primer
cagcattgtggcattcttct

SEQ ID NO: 1923 - DNA, 225 bp, Artificial Sequence
  Description of Artificial Sequence: Synthetic polynucleotide
aagagtatatgcaaaggcctggcagctagaaacagcacaagggtttctgaagttcagtgtgttactaagagtctgtgactccaaactgtgttgcaaatatttctatgcaaatttcatgtgtgtgacagctttcatgtgttacacacacaggagctgaaggatcctcactgtcgggatgagatggcagccgcccgaggggctctgaagaagaatgccacaatgctg

SEQ ID NO: 1924 - DNA, 80 bp, Artificial Sequence
  Description of Artificial Sequence: Synthetic oligonucleotide
  Description of Combined DNA/RNA Molecule: Synthetic oligonucleotide
aggccttugcatatactcttacgauaacggtacaaggctaaagcuutgctaacggucgagcagcattguggcattcttct

SEQ ID NO: 1925 - DNA, 20 bp, Artificial Sequence
  Description of Artificial Sequence: Synthetic primer
cccagtgcatgcctggcaag

SEQ ID NO: 1926 - DNA, 20 bp, Artificial Sequence
  Description of Artificial Sequence: Synthetic primer
ctccaaatacacgtttgtag

SEQ ID NO: 1927 - DNA, 225 bp, Artificial Sequence
  Description of Artificial Sequence: Synthetic polynucleotide
ctccaaatacacgtttgtagaagtcaaattagcaacacattgctctccattgttttttaggcttgcacccttgctcggaggaatgcagacgtcttcctgaaatacctgcacaggaacagcgtgaacatgccaggaatggtgacgcacatcaaagctcctgaacagcaagtgaaaagtgagtagagctgggagtctccaggggtggcccagtgcatgcctggcaag

SEQ ID NO: 1928 - DNA, 80 bp, Artificial Sequence
  Description of Artificial Sequence: Synthetic oligonucleotide
  Description of Combined DNA/RNA Molecule: Synthetic oligonucleotide
cccagtgcaugcctggcaagacgauaacggtacaaggctaaagcuutgctaacggucgagctccaaauacacgtttgtag

SEQ ID NO: 1929 - DNA, 20 bp, Artificial Sequence
  Description of Artificial Sequence: Synthetic primer
tttatatgattcctagtgta

SEQ ID NO: 1930 - DNA, 20 bp, Artificial Sequence
  Description of Artificial Sequence: Synthetic primer
cacggagtatgggaggaatg

SEQ ID NO: 1931 - DNA, 225 bp, Artificial Sequence
  Description of Artificial Sequence: Synthetic polynucleotide
cacggagtatgggaggaatggtcaccatggagtttatgttcatttacatgtggtcgaggccaaagaacaagaacaaggtcatgcacacctcctcagtatggaggaaggccgtgtgaaggacctgaaacacatcataagccttgtaatattgctctttgcccaggtgagcctattctgcatttggttatgtttgcattatgtgctttttatatgattcctagtgta

SEQ ID NO: 1932 - DNA, 80 bp, Artificial Sequence
  Description of Artificial Sequence: Synthetic oligonucleotide
  Description of Combined DNA/RNA Molecule: Synthetic oligonucleotide
tttatatgautcctagtgtaacgauaacggtacaaggctaaagcuutgctaacggucgagcacggagtaugggaggaatg

SEQ ID NO: 1933 - DNA, 20 bp, Artificial Sequence
  Description of Artificial Sequence: Synthetic primer
tatcagtagctaggccttca

SEQ ID NO: 1934 - DNA, 20 bp, Artificial Sequence
  Description of Artificial Sequence: Synthetic primer
ctctattttcaatttttctt

SEQ ID NO: 1935 - DNA, 226 bp, Artificial Sequence
  Description of Artificial Sequence: Synthetic polynucleotide
tgaaggcctagctactgatagaagatgtatcaaaaatacaacaaaaccaaccttggtgctatgaatgtatagccagattcttcaaaattatctggcttcagggtttccgaatctgcaaagataatgttacaggattagataggtaattcagagtatatatccagagattctataacaataagaaggcatgagaaagattacctaataagaaaaattgaaaatagag

SEQ ID NO: 1936 - DNA, 80 bp, Artificial Sequence
  Description of Artificial Sequence: Synthetic oligonucleotide
  Description of Combined DNA/RNA Molecule: Synthetic oligonucleotide
tatcagtagcuaggccttcaacgauaacggtacaaggctaaagcuutgctaacggucgagctctatttucaatttttctt

SEQ ID NO: 1937 - DNA, 20 bp, Artificial Sequence
  Description of Artificial Sequence: Synthetic primer
tagccagggaagaggttgtt

SEQ ID NO: 1938 - DNA, 20 bp, Artificial Sequence
  Description of Artificial Sequence: Synthetic primer
ctggagaaaattcttgtgag

SEQ ID NO: 1939 - DNA, 226 bp, Artificial Sequence
  Description of Artificial Sequence: Synthetic polynucleotide
ctggagaaaattcttgtgagtctcactatgaaaaactgtaaagctgcaatgaattttttccaaagcgtgccagaatggtatgttatctaataatgctctttatcattttaagctatagctttaattacaaagatgataattttagctgggtagtagctgcatcttaataattgtaaactaaattggtccaaaaaaattgcaactgttagccagggaagaggttgtt

SEQ ID NO: 1940 - DNA, 80 bp, Artificial Sequence
  Description of Artificial Sequence: Synthetic oligonucleotide
  Description of Combined DNA/RNA Molecule: Synthetic oligonucleotide
tagccagggaagaggutgttacgauaacggtacaaggctaaagcuutgctaacggucgagctggagaaaautcttgtgag

SEQ ID NO: 1941 - DNA, 20 bp, Artificial Sequence
  Description of Artificial Sequence: Synthetic primer
actttagctatctaaactcc

SEQ ID NO: 1942 - DNA, 20 bp, Artificial Sequence
  Description of Artificial Sequence: Synthetic primer
ctcctacttcatttttgaag

SEQ ID NO: 1943 - DNA, 227 bp, Artificial Sequence
  Description of Artificial Sequence: Synthetic polynucleotide
ctcctacttcatttttgaaggcttgtaactgctgaggtgtaggtgctgtcacattcaacattttcactgccacatcacctaaaaggcaattgttactccaagtgtcatttcaatttttaaaatttaaaagtataaaacattcttgggtgttttcactaattatcatagccctaactccataccattattaaatcacaaataaattatactttagctatctaaactcc

SEQ ID NO: 1944 - DNA, 80 bp, Artificial Sequence
  Description of Artificial Sequence: Synthetic oligonucleotide
  Description of Combined DNA/RNA Molecule: Synthetic oligonucleotide
actttagcuatctaaactccacgauaacggtacaaggctaaagcuutgctaacggucgagctcctactucatttttgaag

SEQ ID NO: 1945 - DNA, 20 bp, Artificial Sequence
  Description of Artificial Sequence: Synthetic primer
acaaaatgctggcttttgga

SEQ ID NO: 1946 - DNA, 20 bp, Artificial Sequence
  Description of Artificial Sequence: Synthetic primer
catagcttgtcctggtctca

SEQ ID NO: 1947 - DNA, 227 bp, Artificial Sequence
  Description of Artificial Sequence: Synthetic polynucleotide
catagcttgtcctggtctcataatccagaggtccattcacatagataacacctgtgatgttattaattccaaatgtatctagaaattaaaatacaattacctggtcattgtctttacgctataaggaaagaaattctctttaaaaggcactgtgatttcaaaaacactaaaaatgcctatttataactagagtgatgcatgaaagtgacaaaatgctggcttttgga

SEQ ID NO: 1948 - DNA, 80 bp, Artificial Sequence
  Description of Artificial Sequence: Synthetic oligonucleotide
  Description of Combined DNA/RNA Molecule: Synthetic oligonucleotide
acaaaatgcuggcttttggaacgauaacggtacaaggctaaagcuutgctaacggucgagcatagcttgucctggtctca

SEQ ID NO: 1949 - DNA, 20 bp, Artificial Sequence
  Description of Artificial Sequence: Synthetic primer
cccagattctgaccagactc

SEQ ID NO: 1950 - DNA, 20 bp, Artificial Sequence
  Description of Artificial Sequence: Synthetic primer
ctttttcatgtctgttcttt

SEQ ID NO: 1951 - DNA, 227 bp, Artificial Sequence
  Description of Artificial Sequence: Synthetic polynucleotide
ctttttcatgtctgttctttaagatgggggtgagtctaggcagcagatctttaattggtggagtcatcttatgcatacctatttaatagaagtcaataaactatcaacatttgaattgcaacttttgttcactttccttttacttagcaatgtcatatatgactatgtataaatataaacttacagctgcctagggaaagagaaagccccagattctgaccagactc

SEQ ID NO: 1952 - DNA, 80 bp, Artificial Sequence
  Description of Artificial Sequence: Synthetic oligonucleotide
  Description of Combined DNA/RNA Molecule: Synthetic oligonucleotide
cccagattcugaccagactcacgauaacggtacaaggctaaagcuutgctaacggucgagctttttcaugtctgttcttt

SEQ ID NO: 1953 - DNA, 20 bp, Artificial Sequence
  Description of Artificial Sequence: Synthetic primer
ccctgaagccccatctagca

SEQ ID NO: 1954 - DNA, 20 bp, Artificial Sequence
  Description of Artificial Sequence: Synthetic primer
ccggttcagataatcaaaca

SEQ ID NO: 1955 - DNA, 227 bp, Artificial Sequence
  Description of Artificial Sequence: Synthetic polynucleotide
tgctagatggggcttcagggggcatggaggtgggaaatgtgaattcaggagtctaacctgattttgtgttgtatacactcatccttaccaaccttcactgttttgctgatagttacactttttctgggactcatctgtggttctctgcagataatggcacctggacacagctgtggcttgtttctgactatcatgagcacgggtccctgtttgattatctgaaccgg

SEQ ID NO: 1956 - DNA, 80 bp, Artificial Sequence
  Description of Artificial Sequence: Synthetic oligonucleotide
  Description of Combined DNA/RNA Molecule: Synthetic oligonucleotide
ccctgaagccccauctagcaacgauaacggtacaaggctaaagcuutgctaacggucgagccggttcagauaatcaaaca

SEQ ID NO: 1957 - DNA, 20 bp, Artificial Sequence
  Description of Artificial Sequence: Synthetic primer
cctccgtctgcgccgtctgt

SEQ ID NO: 1958 - DNA, 20 bp, Artificial Sequence
  Description of Artificial Sequence: Synthetic primer
cgacgaggacgactcggcgc

SEQ ID NO: 1959 - DNA, 228 bp, Artificial Sequence
  Description of Artificial Sequence: Synthetic polynucleotide
cgacgaggacgactcggcgcccaccttccccgcgggcgtcgacaccgccagcgccgtggtggagttcaagcggaaggaggtgcttgtccgcgcgtgctgtggtctacccagtgtctgtctccggccacagttcgtttctcggtcggtttagtgtccgtgtagccacccaaccgtgtggccgaccattcgcgctttcatttgtccttcgcctccgtctgcgccgtctgt

SEQ ID NO: 1960 - DNA, 80 bp, Artificial Sequence
  Description of Artificial Sequence: Synthetic oligonucleotide
  Description of Combined DNA/RNA Molecule: Synthetic oligonucleotide
cctccgtcugcgccgtctgtacgauaacggtacaaggctaaagcuutgctaacggucgagcgacgaggacgacucggcgc

SEQ ID NO: 1961 - DNA, 20 bp, Artificial Sequence
  Description of Artificial Sequence: Synthetic primer
atccctgttttataaatgaa

SEQ ID NO: 1962 - DNA, 20 bp, Artificial Sequence
  Description of Artificial Sequence: Synthetic primer
catgaggactggggagggct

SEQ ID NO: 1963 - DNA, 228 bp, Artificial Sequence
  Description of Artificial Sequence: Synthetic polynucleotide
ttcatttataaaacagggatattacctacctcataaacattatttaaaaatttttattaaatattatatgcatggcattagcaaagactcaaaaaataaaaactataattactccttaatgtcagcttattatattcaatttaaacccacctataatggtgaatatcttcaaatgatttagtattatttatggcaaatacacaaagaaagccctccccagtcctcatg

SEQ ID NO: 1964 - DNA, 80 bp, Artificial Sequence
  Description of Artificial Sequence: Synthetic oligonucleotide
  Description of Combined DNA/RNA Molecule: Synthetic oligonucleotide
atccctgttutataaatgaaacgauaacggtacaaggctaaagcuutgctaacggucgagcatgaggacuggggagggct

SEQ ID NO: 1965 - DNA, 20 bp, Artificial Sequence
  Description of Artificial Sequence: Synthetic primer
ttaagccaacgaaaaattag

SEQ ID NO: 1966 - DNA, 20 bp, Artificial Sequence
  Description of Artificial Sequence: Synthetic primer
ccattcttttagggaagcag

SEQ ID NO: 1967 - DNA, 228 bp, Artificial Sequence
  Description of Artificial Sequence: Synthetic polynucleotide
ctaatttttcgttggcttaaagtattcataaaaattaattattatttcaaggagattttggagtttctcgacttctaatgggatcctgtgacctggccacaactttaactggaactccccattatatgagtcctgaggctctgaaacaccaaggctatgacacaaagtcggacatctggtgagtgggctagtgggctagactcttcatctgcttccctaaaagaatgg

SEQ ID NO: 1968 - DNA, 80 bp, Artificial Sequence
  Description of Artificial Sequence: Synthetic oligonucleotide
  Description of Combined DNA/RNA Molecule: Synthetic oligonucleotide
ttaagccaacgaaaaautagacgauaacggtacaaggctaaagcuutgctaacggucgagccattctttuagggaagcag

SEQ ID NO: 1969 - DNA, 20 bp, Artificial Sequence
  Description of Artificial Sequence: Synthetic primer
attacctcaggggccaagta

SEQ ID NO: 1970 - DNA, 20 bp, Artificial Sequence
  Description of Artificial Sequence: Synthetic primer
cagcaaaaacatactattat

SEQ ID NO: 1971 - DNA, 228 bp, Artificial Sequence
  Description of Artificial Sequence: Synthetic polynucleotide
cagcaaaaacatactattattaactttcctctccaaaagattattccaataaatgcacaatttccttttattatattaatatttctttatacataccacacaaagctcaaataaaatgattccaagagaccatacatctgatttggggccagaaggcaatggttttttacttggcatgtgatcagtggttttgaaaattccctgtgcaattacctcaggggccaagta

SEQ ID NO: 1972 - DNA, 80 bp, Artificial Sequence
  Description of Artificial Sequence: Synthetic oligonucleotide
  Description of Combined DNA/RNA Molecule: Synthetic oligonucleotide
attaccucaggggccaagtaacgauaacggtacaaggctaaagcuutgctaacggucgagcagcaaaaacauactattat

SEQ ID NO: 1973 - DNA, 20 bp, Artificial Sequence
  Description of Artificial Sequence: Synthetic primer
aaatctagaataagattacc

SEQ ID NO: 1974 - DNA, 20 bp, Artificial Sequence
  Description of Artificial Sequence: Synthetic primer
cctgctgtaagtcttcactt

SEQ ID NO: 1975 - DNA, 229 bp, Artificial Sequence
  Description of Artificial Sequence: Synthetic polynucleotide
ggtaatcttattctagattttttatgagtgaagtatcagttatgattaaaacaaaataatgaaaactgaattagacatttagtagccaaaaataaagcttggcttcaagttgtctttttaatgatcctctattctgtatttaatttacaggctacgctatgctctatgaaaggctgcatgagagcacttgtggcccaactaaaatctgaaagtgaagacttacagcagg

SEQ ID NO: 1976 - DNA, 80 bp, Artificial Sequence
  Description of Artificial Sequence: Synthetic oligonucleotide
  Description of Combined DNA/RNA Molecule: Synthetic oligonucleotide
aaatctagaauaagattaccacgauaacggtacaaggctaaagcuutgctaacggucgagcctgctguaagtcttcactt

SEQ ID NO: 1977 - DNA, 20 bp, Artificial Sequence
  Description of Artificial Sequence: Synthetic primer
atattttaaagcaaaatttt

SEQ ID NO: 1978 - DNA, 20 bp, Artificial Sequence
  Description of Artificial Sequence: Synthetic primer
catacgctctgagagatcca

SEQ ID NO: 1979 - DNA, 229 bp, Artificial Sequence
  Description of Artificial Sequence: Synthetic polynucleotide
catacgctctgagagatccataatactaattaacttctgcctgtctatcatctcatccaatatcctcatactggttggacagactcagacacataataaggtatgactggtaattattctgattctttttttgtgtttatattttggcatattgttagttattgataatctaaacattcattctaaaatggagaacttctgacaaaattatattttaaagcaaaatttt

SEQ ID NO: 1980 - DNA, 80 bp, Artificial Sequence
  Description of Artificial Sequence: Synthetic oligonucleotide
  Description of Combined DNA/RNA Molecule: Synthetic oligonucleotide
atatttuaaagcaaaattttacgauaacggtacaaggctaaagcuutgctaacggucgagcatacgctcugagagatcca

SEQ ID NO: 1981 - DNA, 20 bp, Artificial Sequence
  Description of Artificial Sequence: Synthetic primer
tatataactcgaggactttt

SEQ ID NO: 1982 - DNA, 20 bp, Artificial Sequence
  Description of Artificial Sequence: Synthetic primer
cacctttcgagttgtggctt

SEQ ID NO: 1983 - DNA, 229 bp, Artificial Sequence
  Description of Artificial Sequence: Synthetic polynucleotide
cacctttcgagttgtggcttacaatgaatggggaccgggagagagttctcaacccatcaaggtggccacacagcctgagtgtgagtatgaaaaggaacgggccacatttaaaaagtatttattttcctctgcaatatccttgaattctttcacagaacctttgcgaagtgacaaaagcgaagaagagttttttttcttctaagtaaacttatataactcgaggactttt

SEQ ID NO: 1984 - DNA, 80 bp, Artificial Sequence
  Description of Artificial Sequence: Synthetic oligonucleotide
  Description of Combined DNA/RNA Molecule: Synthetic oligonucleotide
tatataacucgaggacttttacgauaacggtacaaggctaaagcuutgctaacggucgagcacctttcgagutgtggctt

SEQ ID NO: 1985 - DNA, 20 bp, Artificial Sequence
  Description of Artificial Sequence: Synthetic primer
atgagctgtccattgaggta

SEQ ID NO: 1986 - DNA, 20 bp, Artificial Sequence
  Description of Artificial Sequence: Synthetic primer
cgtgaaactcaggccttggt

SEQ ID NO: 1987 - DNA, 229 bp, Artificial Sequence
  Description of Artificial Sequence: Synthetic polynucleotide
cgtgaaactcaggccttggttcaggagctctcctaaggacagacctaaaatcttccctctgttgaatctcaagcttcactttatgctctatcacaccttcaggattttccgcggtgaccttcacttcacctgtgtcatatgatttgcagtccacgatgtccaggtaatggataccatcatagcgaactctgaaccttttgcttttgcggatgagctgtccattgaggta

SEQ ID NO: 1988 - DNA, 80 bp, Artificial Sequence
  Description of Artificial Sequence: Synthetic oligonucleotide
  Description of Combined DNA/RNA Molecule: Synthetic oligonucleotide
atgagctguccattgaggtaacgauaacggtacaaggctaaagcuutgctaacggucgagcgtgaaacucaggccttggt

SEQ ID NO: 1989 - DNA, 20 bp, Artificial Sequence
  Description of Artificial Sequence: Synthetic primer
agcagaatgatagccagggt

SEQ ID NO: 1990 - DNA, 20 bp, Artificial Sequence
  Description of Artificial Sequence: Synthetic primer
caggtaagactgttgctgcc

SEQ ID NO: 1991 - DNA, 230 bp, Artificial Sequence
  Description of Artificial Sequence: Synthetic polynucleotide
accctggctatcattctgcttttcttggctgtctttcagatttgactttatttctaaaaatatttcaatgggtcatatcacagattctttttttttaaattaaagtaacatttccaatctactaatgctaatactgtttcgtatttatagctgatttgatggagttggacatggccatggaaccagacagaaaagcggctgttagtcactggcagcaacagtcttacctg

SEQ ID NO: 1992 - DNA, 80 bp, Artificial Sequence
  Description of Artificial Sequence: Synthetic oligonucleotide
  Description of Combined DNA/RNA Molecule: Synthetic oligonucleotide
agcagaatgauagccagggtacgauaacggtacaaggctaaagcuutgctaacggucgagcaggtaagacugttgctgcc

SEQ ID NO: 1993 - DNA, 20 bp, Artificial Sequence
  Description of Artificial Sequence: Synthetic primer
gtttctgatgtgagcgagag

SEQ ID NO: 1994 - DNA, 20 bp, Artificial Sequence
  Description of Artificial Sequence: Synthetic primer
ctctaggtttttagcaaatg

SEQ ID NO: 1995 - DNA, 230 bp, Artificial Sequence
  Description of Artificial Sequence: Synthetic polynucleotide
ctctcgctcacatcagaaaccagaaaaagggtaaacagtattcatatatacctgaatgatcaactgattttgctagatcatctgaaattattccaagaatgtcatcatctgtgtttaaaacttcagaaatatcagctaatgggtcatcagcaggacctaaatatagtaaatatgttttttaaaatttcagtattttctcagatattaagccatttgctaaaaacctagag

SEQ ID NO: 1996 - DNA, 80 bp, Artificial Sequence
  Description of Artificial Sequence: Synthetic oligonucleotide
  Description of Combined DNA/RNA Molecule: Synthetic oligonucleotide
gtttctgaugtgagcgagagacgauaacggtacaaggctaaagcuutgctaacggucgagctctaggttuttagcaaatg

SEQ ID NO: 1997 - DNA, 20 bp, Artificial Sequence
  Description of Artificial Sequence: Synthetic primer
aaaaacacattttctgaggg

SEQ ID NO: 1998 - DNA, 20 bp, Artificial Sequence
  Description of Artificial Sequence: Synthetic primer
cagagttactacttagacag

SEQ ID NO: 1999 - DNA, 230 bp, Artificial Sequence
  Description of Artificial Sequence: Synthetic polynucleotide
cagagttactacttagacagagaagctgggcgtgcacctggagatgctgttcataagatctacccaagtgcatatataaaggttagttacaattttatttgaatattttagacttaaagctctatttgttgtcaaaagaattgaaatctgggtggaaggaatggaaaaatgttttatatattaaataataagaaattgtgtttaagtataaaaaacacattttctgaggg

SEQ ID NO: 2000 - DNA, 80 bp, Artificial Sequence
  Description of Artificial Sequence: Synthetic oligonucleotide
  Description of Combined DNA/RNA Molecule: Synthetic oligonucleotide
aaaaacacautttctgagggacgauaacggtacaaggctaaagcuutgctaacggucgagcagagttacuacttagacag

SEQ ID NO: 2001 - DNA, 20 bp, Artificial Sequence
  Description of Artificial Sequence: Synthetic primer
agatatgagtaagctcttca

SEQ ID NO: 2002 - DNA, 20 bp, Artificial Sequence
  Description of Artificial Sequence: Synthetic primer
cctgctgaatacaagttgac

SEQ ID NO: 2003 - DNA, 230 bp, Artificial Sequence
  Description of Artificial Sequence: Synthetic polynucleotide
tgaagagcttactcatatctttatcttccccaaaagagaaaacatgggtaatttaggaagataagctgctttatttttaactgcagtgtgttttgaaagagactatgtcatgattcatcttactagcctcaaacatatcttctttgccaggactcgcctctgcacaaagccctcttttgggtagctgtggctgtgctgcagcttgatgaggtcaacttgtattcagcagg

SEQ ID NO: 2004 - DNA, 80 bp, Artificial Sequence
  Description of Artificial Sequence: Synthetic oligonucleotide
  Description of Combined DNA/RNA Molecule: Synthetic oligonucleotide
agatatgaguaagctcttcaacgauaacggtacaaggctaaagcuutgctaacggucgagcctgctgaauacaagttgac

SEQ ID NO: 2005 - DNA, 20 bp, Artificial Sequence
  Description of Artificial Sequence: Synthetic primer
gcaggactttttgctgtttc

SEQ ID NO: 2006 - DNA, 20 bp, Artificial Sequence
  Description of Artificial Sequence: Synthetic primer
ctgtttgaattattttcata

SEQ ID NO: 2007 - DNA, 230 bp, Artificial Sequence
  Description of Artificial Sequence: Synthetic polynucleotide
gaaacagcaaaaagtcctgcaacttgttacacaaatcagtccccttattcagtcattgaaaattcagccttagctttttacacaagttgtagtagaaaaacttctgtgagtcagacttcattacttgaagcaaaaaaatggcttagagaaggaatatttgatggtcaaccagaaagaataaatactgcagattatgtaggaaattatttgtatgaaaataattcaaacag

SEQ ID NO: 2008 - DNA, 80 bp, Artificial Sequence
  Description of Artificial Sequence: Synthetic oligonucleotide
  Description of Combined DNA/RNA Molecule: Synthetic oligonucleotide
gcaggacttuttgctgtttcacgauaacggtacaaggctaaagcuutgctaacggucgagctgtttgaautattttcata

SEQ ID NO: 2009 - DNA, 20 bp, Artificial Sequence
  Description of Artificial Sequence: Synthetic primer
attattattaaagcatgttt

SEQ ID NO: 2010 - DNA, 20 bp, Artificial Sequence
  Description of Artificial Sequence: Synthetic primer
ctaaagaatagttccagaga

SEQ ID NO: 2011 - DNA, 231 bp, Artificial Sequence
  Description of Artificial Sequence: Synthetic polynucleotide
aaacatgctttaataataatcaagctggccaataatacaattttctaggaattttgcaagaaatatattatattccaaaatggtgtctagatatgtgtttagattattaaatataactcttaaaatattttgttatttatttcttatcaggtccccgactattccttccttgccccatggatgtagaaggttctagagtatggttcatggatctctggaactattctttag

SEQ ID NO: 2012 - DNA, 80 bp, Artificial Sequence
  Description of Artificial Sequence: Synthetic oligonucleotide
  Description of Combined DNA/RNA Molecule: Synthetic oligonucleotide
attattatuaaagcatgtttacgauaacggtacaaggctaaagcuutgctaacggucgagctaaagaauagttccagaga

SEQ ID NO: 2013 - DNA, 20 bp, Artificial Sequence
  Description of Artificial Sequence: Synthetic primer
tcctccatgatcaaatcccc

SEQ ID NO: 2014 - DNA, 20 bp, Artificial Sequence
  Description of Artificial Sequence: Synthetic primer
cacaatactttgattaatgg

SEQ ID NO: 2015 - DNA, 231 bp, Artificial Sequence
  Description of Artificial Sequence: Synthetic polynucleotide
cacaatactttgattaatggcagcagcagaaattacaccaaccatggtccctttggtggcaagttcacttactggaggaggtctgcaggtttagagaagatgatgtatttatttttaaatataatttttgatgtaactttacgttcacagaaaaattgagagaaagataagagatttctgatataccctctgccctcacacattcatggcctcctccatgatcaaatcccc

SEQ ID NO: 2016 - DNA, 80 bp, Artificial Sequence
  Description of Artificial Sequence: Synthetic oligonucleotide
  Description of Combined DNA/RNA Molecule: Synthetic oligonucleotide
tcctccatgaucaaatccccacgauaacggtacaaggctaaagcuutgctaacggucgagcacaatactutgattaatgg

SEQ ID NO: 2017 - DNA, 20 bp, Artificial Sequence
  Description of Artificial Sequence: Synthetic primer
ctaaataattttaaagcttc

SEQ ID NO: 2018 - DNA, 20 bp, Artificial Sequence
  Description of Artificial Sequence: Synthetic primer
ctgcagtccaaagaaccagg

SEQ ID NO: 2019 - DNA, 231 bp, Artificial Sequence
  Description of Artificial Sequence: Synthetic polynucleotide
gaagctttaaaattatttaggaattcagtcctcatcagctgtcttagtgtcatccccacgttttggaacctgagagtggagagtgcagagaaaaggttttattaatgatttttgctcacagtgtccttccccattggtttgttattgcagatgaagtggaaagggaaggacctctttgatttggtgtgccggactctggggctccgagaaacctggttctttggactgcag

SEQ ID NO: 2020 - DNA, 80 bp, Artificial Sequence
  Description of Artificial Sequence: Synthetic oligonucleotide
  Description of Combined DNA/RNA Molecule: Synthetic oligonucleotide
ctaaataatuttaaagcttcacgauaacggtacaaggctaaagcuutgctaacggucgagctgcaguccaaagaaccagg

SEQ ID NO: 2021 - DNA, 20 bp, Artificial Sequence
  Description of Artificial Sequence: Synthetic primer
ggccaccattacccaggagg

SEQ ID NO: 2022 - DNA, 20 bp, Artificial Sequence
  Description of Artificial Sequence: Synthetic primer
cctggctggctaccactgtc

SEQ ID NO: 2023 - DNA, 231 bp, Artificial Sequence
  Description of Artificial Sequence: Synthetic polynucleotide
cctcctgggtaatggtggccttgctgcctagggactggatggaaaggggatggggcgtgggagccaggcctcagtcctggacgagggtggttggaaactgatggaggggaagaaaggacaggctgcaggccctagtagggggatcctcactcctggatgacagtggccgtgtccgcccaggcctgcagggcttcccgcacattgcggttgcgacagtggtagccagccagg

SEQ ID NO: 2024 - DNA, 80 bp, Artificial Sequence
  Description of Artificial Sequence: Synthetic oligonucleotide
  Description of Combined DNA/RNA Molecule: Synthetic oligonucleotide
ggccaccatuacccaggaggacgauaacggtacaaggctaaagcuutgctaacggucgagcctggctggcuaccactgtc

SEQ ID NO: 2025 - DNA, 20 bp, Artificial Sequence
  Description of Artificial Sequence: Synthetic primer
gggacaggttctgacaaatg

SEQ ID NO: 2026 - DNA, 20 bp, Artificial Sequence
  Description of Artificial Sequence: Synthetic primer
caacatctgcgagcagatga

SEQ ID NO: 2027 - DNA, 231 bp, Artificial Sequence
  Description of Artificial Sequence: Synthetic polynucleotide
caacatctgcgagcagatgatccagatccgcgaggaccacatgcgcttcatttcggagctggcgcgctacagcaacagcgaggtgcgccccgcgacctggagctgcacaggcacccgagggtcgcctgtgtgtgtttgcacccaaatcttaggtttaattgctttgaaaaacagtttactaccagatacgatcatatgtcacataatgacagggacaggttctgacaaatg

SEQ ID NO: 2028 - DNA, 80 bp, Artificial Sequence
  Description of Artificial Sequence: Synthetic oligonucleotide
  Description of Combined DNA/RNA Molecule: Synthetic oligonucleotide
gggacaggtuctgacaaatgacgauaacggtacaaggctaaagcuutgctaacggucgagcaacatcugcgagcagatga

SEQ ID NO: 2029 - DNA, 20 bp, Artificial Sequence
  Description of Artificial Sequence: Synthetic primer
accgagaactctcattggta

SEQ ID NO: 2030 - DNA, 20 bp, Artificial Sequence
  Description of Artificial Sequence: Synthetic primer
ccactgaggcttctgcatct

SEQ ID NO: 2031 - DNA, 231 bp, Artificial Sequence
  Description of Artificial Sequence: Synthetic polynucleotide
ccactgaggcttctgcatctccttcggctcacgctgggttgtgagaatcagacaggcacgaagggcggctacagctccctcacggatggcctgtttggggtcccacacggccacaaaaatgttgtcaaagaagggttgcacttgctggaagaagaaggtagggacgctgatggccagctcacggagaaccaggacctggagaaaaaagcaaaccgagaactctcattggta

SEQ ID NO: 2032 - DNA, 80 bp, Artificial Sequence
  Description of Artificial Sequence: Synthetic oligonucleotide
  Description of Combined DNA/RNA Molecule: Synthetic oligonucleotide
accgagaacuctcattggtaacgauaacggtacaaggctaaagcuutgctaacggucgagccactgaggcutctgcatct

SEQ ID NO: 2033 - DNA, 20 bp, Artificial Sequence
  Description of Artificial Sequence: Synthetic primer
cttggcaaattatttggcct

SEQ ID NO: 2034 - DNA, 20 bp, Artificial Sequence
  Description of Artificial Sequence: Synthetic primer
ccagctcttggggttgtctg

SEQ ID NO: 2035 - DNA, 231 bp, Artificial Sequence
  Description of Artificial Sequence: Synthetic polynucleotide
aggccaaataatttgccaagccagccctgggattcaggtcctggaagtgtatctccagccaccctgccatgctacctagatacctttccctaaacaagaggctcgtccctgagctgccttgacaccgtcttttcccatccctggtgccagaatgaggtgcagaacatcaagttcaacagttcaggccagtgcgaagtgcccttggttcggacagacaaccccaagagctgg

SEQ ID NO: 2036 - DNA, 80 bp, Artificial Sequence
  Description of Artificial Sequence: Synthetic oligonucleotide
  Description of Combined DNA/RNA Molecule: Synthetic oligonucleotide
cttggcaaautatttggcctacgauaacggtacaaggctaaagcuutgctaacggucgagccagctctuggggttgtctg

SEQ ID NO: 2037 - DNA, 20 bp, Artificial Sequence
  Description of Artificial Sequence: Synthetic primer
ctacagaacttgcagttgta

SEQ ID NO: 2038 - DNA, 20 bp, Artificial Sequence
  Description of Artificial Sequence: Synthetic primer
cataggctcagaggtgtcaa

SEQ ID NO: 2039 - DNA, 231 bp, Artificial Sequence
  Description of Artificial Sequence: Synthetic polynucleotide
cataggctcagaggtgtcaacgtcttcttcgctcccatcgtgactgttgtgggactcctggctgttggtcagcaaagtctgcagctccacttcctctttctgcacttgctcggaagctccatttgttccacagttgggtgtcttggtttcgaatacacagtgtttttctcgcaagtgtttttctaacaaaatgatcgcatggaaggctttgctacagaacttgcagttgta

SEQ ID NO: 2040 - DNA, 80 bp, Artificial Sequence
  Description of Artificial Sequence: Synthetic oligonucleotide
  Description of Combined DNA/RNA Molecule: Synthetic oligonucleotide
ctacagaacutgcagttgtaacgauaacggtacaaggctaaagcuutgctaacggucgagcataggcucagaggtgtcaa

SEQ ID NO: 2041 - DNA, 20 bp, Artificial Sequence
  Description of Artificial Sequence: Synthetic primer
gtctgaacaaggaaaacacg

SEQ ID NO: 2042 - DNA, 20 bp, Artificial Sequence
  Description of Artificial Sequence: Synthetic primer
cgtttttattctgcgtaaag

SEQ ID NO: 2043 - DNA, 231 bp, Artificial Sequence
  Description of Artificial Sequence: Synthetic polynucleotide
cgtttttattctgcgtaaagcaccaggggccctccatctggcctccggggttccggcagtaggcgtgcccccctccaagctcagggaagtctgtgctggacaggtggtggctgtgggggtgctgcagggcccacggctggcactggtggcctgacttggtggtgcttgccgttcctctgtaatccatgcctgagccgttatagcactgatggtctgaacaaggaaaacacg

SEQ ID NO: 2044 - DNA, 80 bp, Artificial Sequence
  Description of Artificial Sequence: Synthetic oligonucleotide
  Description of Combined DNA/RNA Molecule: Synthetic oligonucleotide
gtcugaacaaggaaaacacgacgauaacggtacaaggctaaagcuutgctaacggucgagcgtttttatuctgcgtaaag

SEQ ID NO: 2045 - DNA, 20 bp, Artificial Sequence
  Description of Artificial Sequence: Synthetic primer
atgcccaacagaagcgcagc

SEQ ID NO: 2046 - DNA, 20 bp, Artificial Sequence
  Description of Artificial Sequence: Synthetic primer
cagaaggaatcaaatgactg

SEQ ID NO: 2047 - DNA, 231 bp, Artificial Sequence
  Description of Artificial Sequence: Synthetic polynucleotide
gctgcgcttctgttgggcattgaggacccctacatctgcacatacacacaggtgactgtccgggatggcatgagtgtctacgactctctagacaaggccctgaaggtgcggggtctaaatcaggactgctgtgtggtctaccgactcatcaaggggtgagtgtggcagccccacgcccacccactgggtgtcccacctcccatcccctcctcagtcatttgattccttctg

SEQ ID NO: 2048 - DNA, 80 bp, Artificial Sequence
  Description of Artificial Sequence: Synthetic oligonucleotide
  Description of Combined DNA/RNA Molecule: Synthetic oligonucleotide
augcccaacagaagcgcagcacgauaacggtacaaggctaaagcuutgctaacggucgagcagaaggaaucaaatgactg

SEQ ID NO: 2049 - DNA, 20 bp, Artificial Sequence
  Description of Artificial Sequence: Synthetic primer
gacaagaaaatgcattcagc

SEQ ID NO: 2050 - DNA, 20 bp, Artificial Sequence
  Description of Artificial Sequence: Synthetic primer
cttacatctggcctgagtta

SEQ ID NO: 2051 - DNA, 231 bp, Artificial Sequence
  Description of Artificial Sequence: Synthetic polynucleotide
cttacatctggcctgagttattgtctcttctagtttggcttttatatagtaaaaactgtaggttggtaataccaaggccaaactgcaatagaaacaagagaagcataaacacaaacaaacaaaaatgaaacataacttaaaaaaaagacacatcaagttcatgggaaaatcgaaagatcttcctcatgggaaggaaaagacatattactttgacaagaaaatgcattcagc

SEQ ID NO: 2052 - DNA, 80 bp, Artificial Sequence
  Description of Artificial Sequence: Synthetic oligonucleotide
  Description of Combined DNA/RNA Molecule: Synthetic oligonucleotide
gacaagaaaaugcattcagcacgauaacggtacaaggctaaagcuutgctaacggucgagcttacatcuggcctgagtta

SEQ ID NO: 2053 - DNA, 20 bp, Artificial Sequence
  Description of Artificial Sequence: Synthetic primer
tcaaataaagcaaatgattt

SEQ ID NO: 2054 - DNA, 20 bp, Artificial Sequence
  Description of Artificial Sequence: Synthetic primer
cagtctctggaaagcctgtg

SEQ ID NO: 2055 - DNA, 232 bp, Artificial Sequence
  Description of Artificial Sequence: Synthetic polynucleotide
cagtctctggaaagcctgtgcccactgtgaattggatgaagaatggagatgtggtcattcctagtgattattttcagatagtggtaattattttgtttcatatttgttttataatcccattcattgttttctatttttttcacttgtttttatttcttgaaaaaaaaaaaggttcctgttggagattttttgtgatgtgttaaaaaagttattcaaataaagcaaatgattt

SEQ ID NO: 2056 - DNA, 80 bp, Artificial Sequence
  Description of Artificial Sequence: Synthetic oligonucleotide
  Description of Combined DNA/RNA Molecule: Synthetic oligonucleotide
tcaaauaaagcaaatgatttacgauaacggtacaaggctaaagcuutgctaacggucgagcagtctcuggaaagcctgtg

SEQ ID NO: 2057 - DNA, 20 bp, Artificial Sequence
  Description of Artificial Sequence: Synthetic primer
acccagcatcctgcctctga

SEQ ID NO: 2058 - DNA, 20 bp, Artificial Sequence
  Description of Artificial Sequence: Synthetic primer
ccccctgggcagtcactggg

SEQ ID NO: 2059 - DNA, 232 bp, Artificial Sequence
  Description of Artificial Sequence: Synthetic polynucleotide
ccccctgggcagtcactgggcctggggtgtctgggtgcacacctgctccccttgctgtgggggaggctggggactcgggaagctgctgcgggaggcaggggtggggctcacctccacatcctgcttgttggccagcaccaagacggggacaccgcacagcgcctcgctggtcaccaccttctctggggagggcaggagaggcagcgcctcacacccagcatcctgcctctga

SEQ ID NO: 2060 - DNA, 80 bp, Artificial Sequence
  Description of Artificial Sequence: Synthetic oligonucleotide
  Description of Combined DNA/RNA Molecule: Synthetic oligonucleotide
acccagcaucctgcctctgaacgauaacggtacaaggctaaagcuutgctaacggucgagccccctgggcagucactggg

SEQ ID NO: 2061 - DNA, 20 bp, Artificial Sequence
  Description of Artificial Sequence: Synthetic primer
aatgccagatccttggaaac

SEQ ID NO: 2062 - DNA, 20 bp, Artificial Sequence
  Description of Artificial Sequence: Synthetic primer
cctttgacttagatttccca

SEQ ID NO: 2063 - DNA, 232 bp, Artificial Sequence
  Description of Artificial Sequence: Synthetic polynucleotide
gtttccaaggatctggcatttgtatttttaagaatctaaaacttaaagtataataataataataataataataataataatctcaaaaaaaaatctaaagcagaattaaatattttcattgatttgtgttttctctgacttggcatataggttggcacagttaattatatgccaccagaagcaatcaaagatatgtcttcctccagagagaatgggaaatctaagtcaaagg

SEQ ID NO: 2064 - DNA, 80 bp, Artificial Sequence
  Description of Artificial Sequence: Synthetic oligonucleotide
  Description of Combined DNA/RNA Molecule: Synthetic oligonucleotide
aatgccagauccttggaaacacgauaacggtacaaggctaaagcuutgctaacggucgagcctttgactuagatttccca

SEQ ID NO: 2065 - DNA, 20 bp, Artificial Sequence
  Description of Artificial Sequence: Synthetic primer
aactataacatgatttggtc

SEQ ID NO: 2066 - DNA, 20 bp, Artificial Sequence
  Description of Artificial Sequence: Synthetic primer
cctgtctccttagatctctt

SEQ ID NO: 2067 - DNA, 232 bp, Artificial Sequence
  Description of Artificial Sequence: Synthetic polynucleotide
gaccaaatcatgttatagttatgtattgaaaataatctttttaaaaaattgtttgaatttaacttctcatgttttcctgatttttttaaatttttaatgtctctaacattgaatatgctaaatcagaaattatttctcttttcttaatagactggaaggaaagaaaaaggagatcctctcaacattgcgattgataagatgactaagaaaacaagagatctaaggagacagg

SEQ ID NO: 2068 - DNA, 80 bp, Artificial Sequence
  Description of Artificial Sequence: Synthetic oligonucleotide
  Description of Combined DNA/RNA Molecule: Synthetic oligonucleotide
aactataacaugatttggtcacgauaacggtacaaggctaaagcuutgctaacggucgagcctgtctccutagatctctt

SEQ ID NO: 2069 - DNA, 20 bp, Artificial Sequence
  Description of Artificial Sequence: Synthetic primer
attttttggtcagtaagaga

SEQ ID NO: 2070 - DNA, 20 bp, Artificial Sequence
  Description of Artificial Sequence: Synthetic primer
ccggagcccttcacatccta

SEQ ID NO: 2071 - DNA, 232 bp, Artificial Sequence
  Description of Artificial Sequence: Synthetic polynucleotide
ccggagcccttcacatcctagctcgggatgttcacaaccgaattgttatcagaggactaaataccattccattgtttgtgcaggtatgttttaagtgaagtgttctaggttttatgtccataaaatttccagattgtaatgactaataacatttcagaaaattagggaccataatagggttaccaacatttaattttatgaaaattccctacattttttggtcagtaagaga

SEQ ID NO: 2072 - DNA, 80 bp, Artificial Sequence
  Description of Artificial Sequence: Synthetic oligonucleotide
  Description of Combined DNA/RNA Molecule: Synthetic oligonucleotide
attttttggucagtaagagaacgauaacggtacaaggctaaagcuutgctaacggucgagccggagcccutcacatccta

SEQ ID NO: 2073 - DNA, 20 bp, Artificial Sequence
  Description of Artificial Sequence: Synthetic primer
ctcaaacctgcgttcaaaag

SEQ ID NO: 2074 - DNA, 20 bp, Artificial Sequence
  Description of Artificial Sequence: Synthetic primer
ctctccaaattcctgctcca

SEQ ID NO: 2075 - DNA, 232 bp, Artificial Sequence
  Description of Artificial Sequence: Synthetic polynucleotide
cttttgaacgcaggtttgaggagttagctacgggccactgctgctctgagagggcagcttagcagatttttagggatcctggaataatcctttatggttaatcagaacataagatctggttcagaactatttttcttctgtctttggcagggaaatgaaccgaaggcagacatatgaacaagcaaataagatctatgacaaagccatgaaactggagcaggaatttggagag

SEQ ID NO: 2076 - DNA, 80 bp, Artificial Sequence
  Description of Artificial Sequence: Synthetic oligonucleotide
  Description of Combined DNA/RNA Molecule: Synthetic oligonucleotide
ctcaaaccugcgttcaaaagacgauaacggtacaaggctaaagcuutgctaacggucgagctctccaaautcctgctcca

SEQ ID NO: 2077 - DNA, 20 bp, Artificial Sequence
  Description of Artificial Sequence: Synthetic primer
tgaatattggcgaatttgta

SEQ ID NO: 2078 - DNA, 20 bp, Artificial Sequence
  Description of Artificial Sequence: Synthetic primer
cttagcaccacattgattac

SEQ ID NO: 2079 - DNA, 232 bp, Artificial Sequence
  Description of Artificial Sequence: Synthetic polynucleotide
cttagcaccacattgattacagatatattctccagtgggacgtgcaggtgcacctcctactgcctgcatcatcttaagagatgtctgctctatggccacaggagatagggggcttaaggccctggatttcttcccattgtggatataattcagggccaagggaatgtttttatgattctctttgatatgcttgttcagtttaagaacgctgttgaatattggcgaatttgta

SEQ ID NO: 2080 - DNA, 80 bp, Artificial Sequence
  Description of Artificial Sequence: Synthetic oligonucleotide
  Description of Combined DNA/RNA Molecule: Synthetic oligonucleotide
tgaatatuggcgaatttgtaacgauaacggtacaaggctaaagcuutgctaacggucgagcttagcaccacautgattac

SEQ ID NO: 2081 - DNA, 20 bp, Artificial Sequence
  Description of Artificial Sequence: Synthetic primer
cagcctagaaacaacatcca

SEQ ID NO: 2082 - DNA, 20 bp, Artificial Sequence
  Description of Artificial Sequence: Synthetic primer
cctggcactgagtatggagt

SEQ ID NO: 2083 - DNA, 232 bp, Artificial Sequence
  Description of Artificial Sequence: Synthetic polynucleotide
tggatgttgtttctaggctgacagttgtcaccagagccctgttcactggaagacattgctttctgattaatttttgctgggacgagcctccatgactccttaggcttataggctaacctggtcttcttcctcagcagtcctcctactcaccagtcctggcattcatggtggctggcacgctttgctgtgagttcatgacggcagatattccaactccatactcagtgccagg

SEQ ID NO: 2084 - DNA, 80 bp, Artificial Sequence
  Description of Artificial Sequence: Synthetic oligonucleotide
  Description of Combined DNA/RNA Molecule: Synthetic oligonucleotide
cagccuagaaacaacatccaacgauaacggtacaaggctaaagcuutgctaacggucgagcctggcacugagtatggagt

SEQ ID NO: 2085 - DNA, 20 bp, Artificial Sequence
  Description of Artificial Sequence: Synthetic primer
aacagtttataaaccagatt

SEQ ID NO: 2086 - DNA, 20 bp, Artificial Sequence
  Description of Artificial Sequence: Synthetic primer
cctttacatctcccaacttt

SEQ ID NO: 2087 - DNA, 233 bp, Artificial Sequence
  Description of Artificial Sequence: Synthetic polynucleotide
aatctggtttataaactgttaagtagggaatattgcgccaaaatcctacttgagttataaattttccatactgcatgttccgtattatttctttgcctttgtctttatgattatgactttttttttaaatcacagatggtgttctcttaccttatttgtattcactgctgtgatgacccagacacattgtgcattgctgtcatactggaacggaaagttgggagatgtaaagg

SEQ ID NO: 2088 - DNA, 80 bp, Artificial Sequence
  Description of Artificial Sequence: Synthetic oligonucleotide
  Description of Combined DNA/RNA Molecule: Synthetic oligonucleotide
aacagtttauaaaccagattacgauaacggtacaaggctaaagcuutgctaacggucgagcctttacauctcccaacttt

SEQ ID NO: 2089 - DNA, 20 bp, Artificial Sequence
  Description of Artificial Sequence: Synthetic primer
ctccacaggggagggcagcg

SEQ ID NO: 2090 - DNA, 20 bp, Artificial Sequence
  Description of Artificial Sequence: Synthetic primer
cttctcccgctgctcgcggt

SEQ ID NO: 2091 - DNA, 233 bp, Artificial Sequence
  Description of Artificial Sequence: Synthetic polynucleotide
cgctgccctcccctgtggagcggaggaggggaggcctggggccgcggcggtgtgcgccccgctctgaccgcagagcccccttcccgaggaaagcggctggcccggtcccggctggtgatcacgcggggcccctgtctgcttggtgcgcaggtgagggtctgcccttccgctgcgccccggacagcctggaggtgagcacgcgctgggccctggaccgcgagcagcgggagaag

SEQ ID NO: 2092 - DNA, 80 bp, Artificial Sequence
  Description of Artificial Sequence: Synthetic oligonucleotide
  Description of Combined DNA/RNA Molecule: Synthetic oligonucleotide
cuccacaggggagggcagcgacgauaacggtacaaggctaaagcuutgctaacggucgagcttctcccgcugctcgcggt

SEQ ID NO: 2093 - DNA, 20 bp, Artificial Sequence
  Description of Artificial Sequence: Synthetic primer
attttttactccaaggagtg

SEQ ID NO: 2094 - DNA, 20 bp, Artificial Sequence
  Description of Artificial Sequence: Synthetic primer
cctagttgttcttccatcgc

SEQ ID NO: 2095 - DNA, 233 bp, Artificial Sequence
  Description of Artificial Sequence: Synthetic polynucleotide
cactccttggagtaaaaaataattttctcatgcaccatgactgacgtatttgcttattcattttctttattggttcttatatgcttttttgcttttactgattaacgtaaatacaagatattgatacttttttattatttgtggttttagttttccttacaaacagatatgaccagaaggcaattggaatatgaagcaaggcaaatcagagttgcgatggaagaacaactagg

SEQ ID NO: 2096 - DNA, 80 bp, Artificial Sequence
  Description of Artificial Sequence: Synthetic oligonucleotide
  Description of Combined DNA/RNA Molecule: Synthetic oligonucleotide
attttttacuccaaggagtgacgauaacggtacaaggctaaagcuutgctaacggucgagcctagttgtucttccatcgc

SEQ ID NO: 2097 - DNA, 20 bp, Artificial Sequence
  Description of Artificial Sequence: Synthetic primer
ctcaagcaaatcaactgaaa

SEQ ID NO: 2098 - DNA, 20 bp, Artificial Sequence
  Description of Artificial Sequence: Synthetic primer
catgaacttgtcttcccgtc

SEQ ID NO: 2099 - DNA, 233 bp, Artificial Sequence
  Description of Artificial Sequence: Synthetic polynucleotide
tttcagttgatttgcttgagatcaagattgcagatacagaatccatatttcgtgtatattgctgatattaatcattaaaatcgtttttgacagtttgacagttaaaggcatttcctgtgaaataatactggtatgtatttaaccatgcagatcctcagtttgtggtctgccagctaaaggtgaagatatattcctccaattcaggacccacacgacgggaagacaagttcatg

SEQ ID NO: 2100 - DNA, 80 bp, Artificial Sequence
  Description of Artificial Sequence: Synthetic oligonucleotide
  Description of Combined DNA/RNA Molecule: Synthetic oligonucleotide
ctcaagcaaaucaactgaaaacgauaacggtacaaggctaaagcuutgctaacggucgagcatgaactugtcttcccgtc

SEQ ID NO: 2101 - DNA, 20 bp, Artificial Sequence
  Description of Artificial Sequence: Synthetic primer
tccggctggacagagcaggc

SEQ ID NO: 2102 - DNA, 20 bp, Artificial Sequence
  Description of Artificial Sequence: Synthetic primer
ccgcctgcggagtaactgca

SEQ ID NO: 2103 - DNA, 233 bp, Artificial Sequence
  Description of Artificial Sequence: Synthetic polynucleotide
gcctgctctgtccagccggagaagccacgggtgcaagatggcggcattcgccacagcccctcgccctcctgcagagagcgcccgagccggcgcaccaccaccctgcagccccacccggccgcctgcatcatgccggccttcggtgctcaccagtccggcccgccgaggaagggcgcggaccacggccgcagcaacgcgcacggacagcatctttgcagttactccgcaggcgg

SEQ ID NO: 2104 - DNA, 80 bp, Artificial Sequence
  Description of Artificial Sequence: Synthetic oligonucleotide
  Description of Combined DNA/RNA Molecule: Synthetic oligonucleotide
tccggcuggacagagcaggcacgauaacggtacaaggctaaagcuutgctaacggucgagccgcctgcggaguaactgca

SEQ ID NO: 2105 - DNA, 20 bp, Artificial Sequence
  Description of Artificial Sequence: Synthetic primer
tgactagtcgctgtttagta

SEQ ID NO: 2106 - DNA, 20 bp, Artificial Sequence
  Description of Artificial Sequence: Synthetic primer
caggtaaggtcacgaagacc

SEQ ID NO: 2107 - DNA, 233 bp, Artificial Sequence
  Description of Artificial Sequence: Synthetic polynucleotide
caggtaaggtcacgaagacctctgataattttaatttctggggaaaaaataaaataatctcttggttattgttacactgggaaagtagaatgcttaaagtaattattagataggtagaataatccttactttctacagagagattacagttggtttcaactctgccaactatcagcttgtaaggtccttcgtctgaagcatgagttcggttaatgactagtcgctgtttagta

SEQ ID NO: 2108 - DNA, 80 bp, Artificial Sequence
  Description of Artificial Sequence: Synthetic oligonucleotide
  Description of Combined DNA/RNA Molecule: Synthetic oligonucleotide
tgactagucgctgtttagtaacgauaacggtacaaggctaaagcuutgctaacggucgagcaggtaaggucacgaagacc

SEQ ID NO: 2109 - DNA, 20 bp, Artificial Sequence
  Description of Artificial Sequence: Synthetic primer
tccaaaagcttaatttatat

SEQ ID NO: 2110 - DNA, 20 bp, Artificial Sequence
  Description of Artificial Sequence: Synthetic primer
ctatcagaagtaggagacct

SEQ ID NO: 2111 - DNA, 234 bp, Artificial Sequence
  Description of Artificial Sequence: Synthetic polynucleotide
ctatcagaagtaggagacctcagatggtcagaagtgttgaggcactttgtgatgcttatattatattagcaaacttagatgccactcagtggaagactcagagaagtatgttttttttaaagaagaaacgttactttcttgctgtgttactctctgtagagatatattagttatagagcctaataagtaaatctgcttaaaatcacaaacgtaatccaaaagcttaatttatat

SEQ ID NO: 2112 - DNA, 80 bp, Artificial Sequence
  Description of Artificial Sequence: Synthetic oligonucleotide
  Description of Combined DNA/RNA Molecule: Synthetic oligonucleotide
tccaaaagcutaatttatatacgauaacggtacaaggctaaagcuutgctaacggucgagctatcagaaguaggagacct

SEQ ID NO: 2113 - DNA, 20 bp, Artificial Sequence
  Description of Artificial Sequence: Synthetic primer
gtcttcagcagccggctcac

SEQ ID NO: 2114 - DNA, 20 bp, Artificial Sequence
  Description of Artificial Sequence: Synthetic primer
caggggttcggcccggaata

SEQ ID NO: 2115 - DNA, 234 bp, Artificial Sequence
  Description of Artificial Sequence: Synthetic polynucleotide
gtgagccggctgctgaagacttgcgaacagttcggagccagcgagagcgcgccagagagagcgagagtgagggagtgagtgcgaggggatctagaggagtcagggcgagaaagcgagggccggaggacccacgatagagacagagtgaccatggctgtctccgcatctccagtgatctctgcaacttccagcggcgccggcgtcccggggggcttattccgggccgaacccctg

SEQ ID NO: 2116 - DNA, 80 bp, Artificial Sequence
  Description of Artificial Sequence: Synthetic oligonucleotide
  Description of Combined DNA/RNA Molecule: Synthetic oligonucleotide
gtctucagcagccggctcacacgauaacggtacaaggctaaagcuutgctaacggucgagcaggggtucggcccggaata

SEQ ID NO: 2117 - DNA, 20 bp, Artificial Sequence
  Description of Artificial Sequence: Synthetic primer
ggtaaatatcaggtagaaac

SEQ ID NO: 2118 - DNA, 20 bp, Artificial Sequence
  Description of Artificial Sequence: Synthetic primer
cacagtcatggttgattttc

SEQ ID NO: 2119 - DNA, 234 bp, Artificial Sequence
  Description of Artificial Sequence: Synthetic polynucleotide
gtttctacctgatatttacctagttttaattgggctgattaaaaagcatttctgatatggataaagtaatgatagtgaatacttgttgaaatttctcccttgaaaaatgaaagagagatggtgattgcatctaatgttttcctgttatagggcaaataatagtggtgatctgggtaatagtttctccaaataatgacaagcagaagtatactctgaaaatcaaccatgactgtg

SEQ ID NO: 2120 - DNA, 80 bp, Artificial Sequence
  Description of Artificial Sequence: Synthetic oligonucleotide
  Description of Combined DNA/RNA Molecule: Synthetic oligonucleotide
ggtaaataucaggtagaaacacgauaacggtacaaggctaaagcuutgctaacggucgagcacagtcauggttgattttc

SEQ ID NO: 2121 - DNA, 20 bp, Artificial Sequence
  Description of Artificial Sequence: Synthetic primer
cccagggaggtggtggggcc

SEQ ID NO: 2122 - DNA, 20 bp, Artificial Sequence
  Description of Artificial Sequence: Synthetic primer
ctcactcctcagcctggatg

SEQ ID NO: 2123 - DNA, 234 bp, Artificial Sequence
  Description of Artificial Sequence: Synthetic polynucleotide
ggccccaccacctccctgggcctccctcagccactagagccctgagcacagcacctaggaggatggtgggcaccgggcttgtggctgacggctcccttctcctttcctccctccttctgtccctgctcagagagggagactggtggctggcccactcgctcagcacaggacagacaggctacatccccagcaactacgtggcgccctccgactccatccaggctgaggagtgag

SEQ ID NO: 2124 - DNA, 80 bp, Artificial Sequence
  Description of Artificial Sequence: Synthetic oligonucleotide
  Description of Combined DNA/RNA Molecule: Synthetic oligonucleotide
cccagggagguggtggggccacgauaacggtacaaggctaaagcuutgctaacggucgagctcactccucagcctggatg

SEQ ID NO: 2125 - DNA, 20 bp, Artificial Sequence
  Description of Artificial Sequence: Synthetic primer
aattgctgatgaaggttgta

SEQ ID NO: 2126 - DNA, 20 bp, Artificial Sequence
  Description of Artificial Sequence: Synthetic primer
cactctttattgtctaattt

SEQ ID NO: 2127 - DNA, 234 bp, Artificial Sequence
  Description of Artificial Sequence: Synthetic polynucleotide
cactctttattgtctaatttttttttaactgaaaggaagtagcagaaccactcctggacctgaaggaaggaatagaccagttggagaacaataaaaccttgggctttatcctgtctactctcttagccattgggaactttctaaatggaactaatgtaagtcatccccatccctcatcctgtagcccccccttgtcacaaaatccctgcccagcaattgctgatgaaggttgta

SEQ ID NO: 2128 - DNA, 80 bp, Artificial Sequence
  Description of Artificial Sequence: Synthetic oligonucleotide
  Description of Combined DNA/RNA Molecule: Synthetic oligonucleotide
aattgctgaugaaggttgtaacgauaacggtacaaggctaaagcuutgctaacggucgagcactctttautgtctaattt

SEQ ID NO: 2129 - DNA, 20 bp, Artificial Sequence
  Description of Artificial Sequence: Synthetic primer
caagaggtcaaccagctggt

SEQ ID NO: 2130 - DNA, 20 bp, Artificial Sequence
  Description of Artificial Sequence: Synthetic primer
ctaagactgtaacagctcta

SEQ ID NO: 2131 - DNA, 234 bp, Artificial Sequence
  Description of Artificial Sequence: Synthetic polynucleotide
ctaagactgtaacagctctacaaagatccgtgaaaaaaagtctatgtcattcaaacttgcttctgagccttccttgacccaaacatggaagaggccaaagcattaacttctactcactctcatgagggtgactatttcatccatataaggtctgatgtggctcttcacaaaggacaccaacattcccagctgctggaacaaaaactgaaatggacaagaggtcaaccagctggt

SEQ ID NO: 2132 - DNA, 80 bp, Artificial Sequence
  Description of Artificial Sequence: Synthetic oligonucleotide
  Description of Combined DNA/RNA Molecule: Synthetic oligonucleotide
caagaggucaaccagctggtacgauaacggtacaaggctaaagcuutgctaacggucgagctaagactguaacagctcta

SEQ ID NO: 2133 - DNA, 20 bp, Artificial Sequence
  Description of Artificial Sequence: Synthetic primer
gcggatgttccccacttgcc

SEQ ID NO: 2134 - DNA, 20 bp, Artificial Sequence
  Description of Artificial Sequence: Synthetic primer
cgacgacgtcaccctgatgg

SEQ ID NO: 2135 - DNA, 234 bp, Artificial Sequence
  Description of Artificial Sequence: Synthetic polynucleotide
cgacgacgtcaccctgatgggcgcggaggtagccagcggcggctgcatgaagaccggactctggaagagcgaaactaccgtctaaggtggggcgggcgacgcggtagacgggctggccacgcggctcgttcccccgctcctcggggccctccaaggtgtctccgtagtcagcaggttggaggcagaggagccgatggctggaggaagcccacaggcggatgttccccacttgcc

SEQ ID NO: 2136 - DNA, 80 bp, Artificial Sequence
  Description of Artificial Sequence: Synthetic oligonucleotide
  Description of Combined DNA/RNA Molecule: Synthetic oligonucleotide
gcggatgtuccccacttgccacgauaacggtacaaggctaaagcuutgctaacggucgagcgacgacgucaccctgatgg

SEQ ID NO: 2137 - DNA, 20 bp, Artificial Sequence
  Description of Artificial Sequence: Synthetic primer
agggaagaggtaattaacaa

SEQ ID NO: 2138 - DNA, 20 bp, Artificial Sequence
  Description of Artificial Sequence: Synthetic primer
cttgcaccgcttctgccaca

SEQ ID NO: 2139 - DNA, 234 bp, Artificial Sequence
  Description of Artificial Sequence: Synthetic polynucleotide
ttgttaattacctcttccctgccagtgacttcacactttaaataaatactcctcccaaatgatttcaaatgacagcacagtgaaactatttttaggggggaaaaaaagtctctgtctcaagcactcaggaaccttactttgtgttttcaggagatactggattcccttgcggagctttactccctgttacaagaggaagatatgtgggctggtctgtggcagaagcggtgcaag

SEQ ID NO: 2140 - DNA, 80 bp, Artificial Sequence
  Description of Artificial Sequence: Synthetic oligonucleotide
  Description of Combined DNA/RNA Molecule: Synthetic oligonucleotide
agggaagagguaattaacaaacgauaacggtacaaggctaaagcuutgctaacggucgagcttgcaccgcutctgccaca

SEQ ID NO: 2141 - DNA, 20 bp, Artificial Sequence
  Description of Artificial Sequence: Synthetic primer
actgtgtgcagaatcagttc

SEQ ID NO: 2142 - DNA, 20 bp, Artificial Sequence
  Description of Artificial Sequence: Synthetic primer
ccccatggccttagggaacc

SEQ ID NO: 2143 - DNA, 235 bp, Artificial Sequence
  Description of Artificial Sequence: Synthetic polynucleotide
gaactgattctgcacacagttgacacaaagtgagactggatgggcgataccccccaacacacaaagttctcttctcatctgcccagatgagggcccctgcctcagccactgttagggtctcccttctgcaccctccttagatgcccccaccttgtggtagagggtgagtgggtctggccggccaggggtgggctccagctcctctagatctgccaggttccctaaggccatgggg

SEQ ID NO: 2144 - DNA, 80 bp, Artificial Sequence
  Description of Artificial Sequence: Synthetic oligonucleotide
  Description of Combined DNA/RNA Molecule: Synthetic oligonucleotide
actgtgugcagaatcagttcacgauaacggtacaaggctaaagcuutgctaacggucgagccccatggccutagggaacc

SEQ ID NO: 2145 - DNA, 20 bp, Artificial Sequence
  Description of Artificial Sequence: Synthetic primer
cttaaattgttttaaggtgt

SEQ ID NO: 2146 - DNA, 20 bp, Artificial Sequence
  Description of Artificial Sequence: Synthetic primer
caccatcaaagcagatgtct

SEQ ID NO: 2147 - DNA, 235 bp, Artificial Sequence
  Description of Artificial Sequence: Synthetic polynucleotide
caccatcaaagcagatgtcttcagctatgctctgtgtctgtgggaaattctcactggcgaaattccattcgctcatctcaagccaggtaagacacactgcaattgaagttttcctgttttacagagttcactggatttttataacttcaagaaaattttttttcacaaaatgattagtctcagtgagatggcaaaagaggaggtaagcaaacaatcttaaattgttttaaggtgt

SEQ ID NO: 2148 - DNA, 80 bp, Artificial Sequence
  Description of Artificial Sequence: Synthetic oligonucleotide
  Description of Combined DNA/RNA Molecule: Synthetic oligonucleotide
cttaaattgutttaaggtgtacgauaacggtacaaggctaaagcuutgctaacggucgagcaccaucaaagcagatgtct

SEQ ID NO: 2149 - DNA, 20 bp, Artificial Sequence
  Description of Artificial Sequence: Synthetic primer
agcttcattcagtaagaaat

SEQ ID NO: 2150 - DNA, 20 bp, Artificial Sequence
  Description of Artificial Sequence: Synthetic primer
cctaccttttgcatagcagt

SEQ ID NO: 2151 - DNA, 235 bp, Artificial Sequence
  Description of Artificial Sequence: Synthetic polynucleotide
cctaccttttgcatagcagtttggatttaccgaatgatttgcaaaacgaattttgttacccttgcgggttgcatccaccacaaaatctaaaaagaaaaaagtaagcacagcccagtgaataatttcagttataagtaaaccaagttattatgattttgtaaatgcaactggttacagttcttcagggtttgcctgcaaaagcaaataaatcaagcagcttcattcagtaagaaat

SEQ ID NO: 2152 - DNA, 80 bp, Artificial Sequence
  Description of Artificial Sequence: Synthetic oligonucleotide
  Description of Combined DNA/RNA Molecule: Synthetic oligonucleotide
agcttcatucagtaagaaatacgauaacggtacaaggctaaagcuutgctaacggucgagcctacctttugcatagcagt

SEQ ID NO: 2153 - DNA, 20 bp, Artificial Sequence
  Description of Artificial Sequence: Synthetic primer
cctgcacggctgtcacgcct

SEQ ID NO: 2154 - DNA, 20 bp, Artificial Sequence
  Description of Artificial Sequence: Synthetic primer
caagcattccatgggcaact

SEQ ID NO: 2155 - DNA, 235 bp, Artificial Sequence
  Description of Artificial Sequence: Synthetic polynucleotide
caagcattccatgggcaacttctctgtttctttttcagagtgcaaccagcaacaattccaccgtggcttgcattgatagaaatggggtatgtatgaacaccttataagccagaatttacagctctccactatggctctattttacatggaaaatgccttaacctaaataattttaacccagataatcttgagttttcttcctgtgtgggtttttccctgcacggctgtcacgcct

SEQ ID NO: 2156 - DNA, 80 bp, Artificial Sequence
  Description of Artificial Sequence: Synthetic oligonucleotide
  Description of Combined DNA/RNA Molecule: Synthetic oligonucleotide
cctgcacggcugtcacgcctacgauaacggtacaaggctaaagcuutgctaacggucgagcaagcatuccatgggcaact

SEQ ID NO: 2157 - DNA, 20 bp, Artificial Sequence
  Description of Artificial Sequence: Synthetic primer
cagagtggctgtgctgaact

SEQ ID NO: 2158 - DNA, 20 bp, Artificial Sequence
  Description of Artificial Sequence: Synthetic primer
cgacatggcacagttagtca

SEQ ID NO: 2159 - DNA, 235 bp, Artificial Sequence
  Description of Artificial Sequence: Synthetic polynucleotide
cgacatggcacagttagtcactgcaacatcattgtctctatcctctgtggagaaagggcgtccttgatgatagctgagggagtcccctgcaaaaaagatacattcattaggctgtcccatttgtcactgctttatcaggattttctggacacttgacccacttccagcaaacctggcttccacttatggaaccttttcatttccacccagtttctcagagtggctgtgctgaact

SEQ ID NO: 2160 - DNA, 80 bp, Artificial Sequence
  Description of Artificial Sequence: Synthetic oligonucleotide
  Description of Combined DNA/RNA Molecule: Synthetic oligonucleotide
cagagtggcugtgctgaactacgauaacggtacaaggctaaagcuutgctaacggucgagcgacauggcacagttagtca

SEQ ID NO: 2161 - DNA, 20 bp, Artificial Sequence
  Description of Artificial Sequence: Synthetic primer
gaaaattccattaggtgtct

SEQ ID NO: 2162 - DNA, 20 bp, Artificial Sequence
  Description of Artificial Sequence: Synthetic primer
catttttaacaaggacaggt

SEQ ID NO: 2163 - DNA, 235 bp, Artificial Sequence
  Description of Artificial Sequence: Synthetic polynucleotide
catttttaacaaggacaggtcttcctcgtggtgaaaaaagtgaccatgttttagtccttaatccagcattgtttcttccaggaaagcatgctttattgtcttcaacgctgccaagcctcttcatgacatccacagcaagccccgtggtgagcagacacatcttccttggtcccccttgctgatgttcttctgcttgggctgtttgctgggagagagaaaattccattaggtgtct

SEQ ID NO: 2164 - DNA, 80 bp, Artificial Sequence
  Description of Artificial Sequence: Synthetic oligonucleotide
  Description of Combined DNA/RNA Molecule: Synthetic oligonucleotide
gaaaattccautaggtgtctacgauaacggtacaaggctaaagcuutgctaacggucgagcattttuaacaaggacaggt

SEQ ID NO: 2165 - DNA, 20 bp, Artificial Sequence
  Description of Artificial Sequence: Synthetic primer
tcctcttttctgcccatgta

SEQ ID NO: 2166 - DNA, 20 bp, Artificial Sequence
  Description of Artificial Sequence: Synthetic primer
ctgcaccaagtgctccaaac

SEQ ID NO: 2167 - DNA, 235 bp, Artificial Sequence
  Description of Artificial Sequence: Synthetic polynucleotide
ctgcaccaagtgctccaaacagtggttcaagaatctgttgttccagttcagttctagctgggattcactcagtttgtgaagtgttaggttctctggagcccaggggatcactggagatatgtgtgcatatgtggtcattcccctggcctagacaagtcaggatcctgaaggtagtgcccctaatacctcctcccttcccatcatgatcccctacctcctcttttctgcccatgta

SEQ ID NO: 2168 - DNA, 80 bp, Artificial Sequence
  Description of Artificial Sequence: Synthetic oligonucleotide
  Description of Combined DNA/RNA Molecule: Synthetic oligonucleotide
tcctctttuctgcccatgtaacgauaacggtacaaggctaaagcuutgctaacggucgagctgcaccaagugctccaaac

SEQ ID NO: 2169 - DNA, 20 bp, Artificial Sequence
  Description of Artificial Sequence: Synthetic primer
gcctctgcccacctttgccg

SEQ ID NO: 2170 - DNA, 20 bp, Artificial Sequence
  Description of Artificial Sequence: Synthetic primer
cccacctcggggagtctttg

SEQ ID NO: 2171 - DNA, 235 bp, Artificial Sequence
  Description of Artificial Sequence: Synthetic polynucleotide
cccacctcggggagtctttgaaagaatgtctctccaggggacagtgcccacgagggctgtgagtgccatgtccccagcttggctcctggctgccactcaccggaaaacgaaagtcccgcctgccccgcggcccagcacgtccttgggattgaaggaaatcttccccactacggtgagttgctcagctgggggagaggagggtggtgactcagggagcctctgcccacctttgccg

SEQ ID NO: 2172 - DNA, 80 bp, Artificial Sequence
  Description of Artificial Sequence: Synthetic oligonucleotide
  Description of Combined DNA/RNA Molecule: Synthetic oligonucleotide
gcctcugcccacctttgccgacgauaacggtacaaggctaaagcuutgctaacggucgagcccaccucggggagtctttg

SEQ ID NO: 2173 - DNA, 20 bp, Artificial Sequence
  Description of Artificial Sequence: Synthetic primer
atttccctatgactgtggta

SEQ ID NO: 2174 - DNA, 20 bp, Artificial Sequence
  Description of Artificial Sequence: Synthetic primer
cccaggaatcctcccgtctc

SEQ ID NO: 2175 - DNA, 235 bp, Artificial Sequence
  Description of Artificial Sequence: Synthetic polynucleotide
cccaggaatcctcccgtctcccacctgtggatatccccacccgcagttcactctccggcctgtgccattcccaacactctcagtggaccgaggtttcggagcaggaagaagtcagtgtaatgcattttcctctctttttaataagcacaaatgaataatagcaaaggtgtcttgtaaaatatgttgcattctgaccttatcccttagaaaagttgatttccctatgactgtggta

SEQ ID NO: 2176 - DNA, 80 bp, Artificial Sequence
  Description of Artificial Sequence: Synthetic oligonucleotide
  Description of Combined DNA/RNA Molecule: Synthetic oligonucleotide
atttccctaugactgtggtaacgauaacggtacaaggctaaagcuutgctaacggucgagcccaggaaucctcccgtctc

SEQ ID NO: 2177 - DNA, 20 bp, Artificial Sequence
  Description of Artificial Sequence: Synthetic primer
tttctaaaagaaaataaaga

SEQ ID NO: 2178 - DNA, 20 bp, Artificial Sequence
  Description of Artificial Sequence: Synthetic primer
ccgaccaatgtctgtgagaa

SEQ ID NO: 2179 - DNA, 236 bp, Artificial Sequence
  Description of Artificial Sequence: Synthetic polynucleotide
ccgaccaatgtctgtgagaagctggtgaatgagacgtcccaccaagggtctgggcgtatcaattcttgcaatgagctgaggtataacctggtattcaaaaagacacagtatgtagcatatgagacttgaaacaactagttattcttctaggcaaagatcaattcttttaacttgtttcggttgatgctctgaaatggttcattcccttccctttagtttctaaaagaaaataaaga

SEQ ID NO: 2180 - DNA, 80 bp, Artificial Sequence
  Description of Artificial Sequence: Synthetic oligonucleotide
  Description of Combined DNA/RNA Molecule: Synthetic oligonucleotide
tttctaaaagaaaauaaagaacgauaacggtacaaggctaaagcuutgctaacggucgagccgaccaaugtctgtgagaa

SEQ ID NO: 2181 - DNA, 20 bp, Artificial Sequence
  Description of Artificial Sequence: Synthetic primer
taacatttttgtatatttcc

SEQ ID NO: 2182 - DNA, 20 bp, Artificial Sequence
  Description of Artificial Sequence: Synthetic primer
caaagaccgcgtggtcacta

SEQ ID NO: 2183 - DNA, 236 bp, Artificial Sequence
  Description of Artificial Sequence: Synthetic polynucleotide
ggaaatatacaaaaatgttaatagctatcttttggttttatgtgatctttatttttaatttttcaatattaagcatgctatacaatctgaactaaaatttaatttaaaatacttatcaagataaaatgtaatttcttttttcttcctaaggttgcacataggcaaaggtgtgcagttggaatgtaaaggtgaaggtgatgtttgggtcaggtgccttagtgaccacgcggtctttg

SEQ ID NO: 2184 - DNA, 80 bp, Artificial Sequence
  Description of Artificial Sequence: Synthetic oligonucleotide
  Description of Combined DNA/RNA Molecule: Synthetic oligonucleotide
taacattttugtatatttccacgauaacggtacaaggctaaagcuutgctaacggucgagcaaagaccgcguggtcacta

SEQ ID NO: 2185 - DNA, 20 bp, Artificial Sequence
  Description of Artificial Sequence: Synthetic primer
aaataccatttaatctgatc

SEQ ID NO: 2186 - DNA, 20 bp, Artificial Sequence
  Description of Artificial Sequence: Synthetic primer
ctttcatggaagccaccaaa

SEQ ID NO: 2187 - DNA, 236 bp, Artificial Sequence
  Description of Artificial Sequence: Synthetic polynucleotide
ctttcatggaagccaccaaacaggatcaattgtctcttccaggccaccatccgatgtccactccgacccgaaggaccgcctgttgatctaaaatgaaataaacaaaaagacactatcaacctgcttaatttctggttgttctaaagacgacaacaacaaacaaaatccaatttttacactgatttctgttttgtgagcacttactgctcacaaattaaataccatttaatctgatc

SEQ ID NO: 2188 - DNA, 80 bp, Artificial Sequence
  Description of Artificial Sequence: Synthetic oligonucleotide
  Description of Combined DNA/RNA Molecule: Synthetic oligonucleotide
aaataccatutaatctgatcacgauaacggtacaaggctaaagcuutgctaacggucgagctttcauggaagccaccaaa

SEQ ID NO: 2189 - DNA, 20 bp, Artificial Sequence
  Description of Artificial Sequence: Synthetic primer
gcatttagaattgataatga

SEQ ID NO: 2190 - DNA, 20 bp, Artificial Sequence
  Description of Artificial Sequence: Synthetic primer
cctatggcaagagcattgac

SEQ ID NO: 2191 - DNA, 236 bp, Artificial Sequence
  Description of Artificial Sequence: Synthetic polynucleotide
cctatggcaagagcattgacctagtcaaatttcttcttgatcagaatgtcataaacatcaaccaccaaggaagggatgggcacactggtaagactgtggtgaaaacaccactagttctatatgcttatcaatgattaagaataatggtatgcaaagggatgtgggggcattgggagtgctcaactccagtgggaaagggtattttatcaactgccagcatttagaattgataatga

SEQ ID NO: 2192 - DNA, 80 bp, Artificial Sequence
  Description of Artificial Sequence: Synthetic oligonucleotide
  Description of Combined DNA/RNA Molecule: Synthetic oligonucleotide
gcatttagaautgataatgaacgauaacggtacaaggctaaagcuutgctaacggucgagcctatggcaagagcautgac

SEQ ID NO: 2193 - DNA, 20 bp, Artificial Sequence
  Description of Artificial Sequence: Synthetic primer
agaaatagtagtagagaaac

SEQ ID NO: 2194 - DNA, 20 bp, Artificial Sequence
  Description of Artificial Sequence: Synthetic primer
ccatgtcactgtcggggatg

SEQ ID NO: 2195 - DNA, 236 bp, Artificial Sequence
  Description of Artificial Sequence: Synthetic polynucleotide
ccatgtcactgtcggggatgggtatccagagatgtggcactccaaggtgacagattcaccttctatgacagtcacattttttaagccctgaagagaggagaaaaaataaataatgatacgtgtgcatattcattaatcacttctgttttgtaacaaatgtagagtttgaacttatgcatttcaactgccacaaaatggccttttaatcaggactccagaaatagtagtagagaaac

SEQ ID NO: 2196 - DNA, 80 bp, Artificial Sequence
  Description of Artificial Sequence: Synthetic oligonucleotide
  Description of Combined DNA/RNA Molecule: Synthetic oligonucleotide
agaaataguagtagagaaacacgauaacggtacaaggctaaagcuutgctaacggucgagccatgtcacugtcggggatg

SEQ ID NO: 2197 - DNA, 20 bp, Artificial Sequence
  Description of Artificial Sequence: Synthetic primer
agattatttctcccaaggca

SEQ ID NO: 2198 - DNA, 20 bp, Artificial Sequence
  Description of Artificial Sequence: Synthetic primer
cctggatgagtttgaatttg

SEQ ID NO: 2199 - DNA, 236 bp, Artificial Sequence
  Description of Artificial Sequence: Synthetic polynucleotide
tgccttgggagaaataatcttgtcataatactttagtgggatatctaaaaagtaacttttataatataatgtaatctggaaaaatactttatcaatatcatatatgaaaacctgctttgtttttcttttaaaatatctttgttttaatagtgttgtttaaaaagggacccaaaacagaggatatccattcctgagctcctggctcatccatatgttcaaattcaaactcatccagg

SEQ ID NO: 2200 - DNA, 80 bp, Artificial Sequence
  Description of Artificial Sequence: Synthetic oligonucleotide
  Description of Combined DNA/RNA Molecule: Synthetic oligonucleotide
agattattuctcccaaggcaacgauaacggtacaaggctaaagcuutgctaacggucgagcctggatgaguttgaatttg

SEQ ID NO: 2201 - DNA, 20 bp, Artificial Sequence
  Description of Artificial Sequence: Synthetic primer
tcctcatcaaggtgaatgtg

SEQ ID NO: 2202 - DNA, 20 bp, Artificial Sequence
  Description of Artificial Sequence: Synthetic primer
catcaacactcagctgctga

SEQ ID NO: 2203 - DNA, 236 bp, Artificial Sequence
  Description of Artificial Sequence: Synthetic polynucleotide
cacattcaccttgatgaggaagagacctgatggcctggctttctaatcccccagtcagtctgttgaaataaggatcacactcatctgtataatatagacatggttttagcaattcgcagttatttttctacattcactttaaatttacagaaagattgtggaagaaaaatatgaagaaaatagcaaacgaatgcaagaattgagatctcggaactttcagcagctgagtgttgatg

SEQ ID NO: 2204 - DNA, 80 bp, Artificial Sequence
  Description of Artificial Sequence: Synthetic oligonucleotide
  Description of Combined DNA/RNA Molecule: Synthetic oligonucleotide
tcctcaucaaggtgaatgtgacgauaacggtacaaggctaaagcuutgctaacggucgagcatcaacacucagctgctga

SEQ ID NO: 2205 - DNA, 20 bp, Artificial Sequence
  Description of Artificial Sequence: Synthetic primer
gaatcacaaacaaacctgaa

SEQ ID NO: 2206 - DNA, 20 bp, Artificial Sequence
  Description of Artificial Sequence: Synthetic primer
ctgttgttgatggtgttgtt

SEQ ID NO: 2207 - DNA, 236 bp, Artificial Sequence
  Description of Artificial Sequence: Synthetic polynucleotide
ttcaggtttgtttgtgattcaactgtgactgagagaattaagttgtatctctgtcttcatagatttatttcaagagaaatgcatctagaatttgttaaaaaggacattaaatacatatgattctttttttgtatttttcatttcatacagaaataagaaatggaaacttaaaagccattctagggctgtttttcagtttatctcgctacaagcagcaacaacaccatcaacaacag

SEQ ID NO: 2208 - DNA, 80 bp, Artificial Sequence
  Description of Artificial Sequence: Synthetic oligonucleotide
  Description of Combined DNA/RNA Molecule: Synthetic oligonucleotide
gaatcacaaacaaaccugaaacgauaacggtacaaggctaaagcuutgctaacggucgagctgttgttgauggtgttgtt

SEQ ID NO: 2209 - DNA, 20 bp, Artificial Sequence
  Description of Artificial Sequence: Synthetic primer
tctagagtggggtgggcttc

SEQ ID NO: 2210 - DNA, 20 bp, Artificial Sequence
  Description of Artificial Sequence: Synthetic primer
ctctttatttctctccctag

SEQ ID NO: 2211 - DNA, 236 bp, Artificial Sequence
  Description of Artificial Sequence: Synthetic polynucleotide
gaagcccaccccactctagaaacactctgcacaagggggagagcctctgtaacgtcctgcgggatgcacccaccgactgaagcccaccccactctacaaacactctgcacaagggggagagcctttgcgacctcccgtggatgcacctaccgactgactggccagcagagtaggaatccgtcctcgttcgggatcgcttgttgcctttggtatttgctagggagagaaataaagag

SEQ ID NO: 2212 - DNA, 80 bp, Artificial Sequence
  Description of Artificial Sequence: Synthetic oligonucleotide
  Description of Combined DNA/RNA Molecule: Synthetic oligonucleotide
tctagaguggggtgggcttcacgauaacggtacaaggctaaagcuutgctaacggucgagctctttattuctctccctag

SEQ ID NO: 2213 - DNA, 20 bp, Artificial Sequence
  Description of Artificial Sequence: Synthetic primer
aggcccaaggggcacagctc

SEQ ID NO: 2214 - DNA, 20 bp, Artificial Sequence
  Description of Artificial Sequence: Synthetic primer
caagaagccggggttccagc

SEQ ID NO: 2215 - DNA, 236 bp, Artificial Sequence
  Description of Artificial Sequence: Synthetic polynucleotide
gagctgtgccccttgggcctccggagagaccccacttattctccctgagaatggtgtcttatatctggaactcactgcttctgtgttcttctcccccatctcaaacacatccttgcatttgtctccacagagaccaccccagatggggcgcctccaacacggccctggcacgatggctccctccagtctatgaggacggcttcagtcagccccgaggctggaaccccggcttcttg

SEQ ID NO: 2216 - DNA, 80 bp, Artificial Sequence
  Description of Artificial Sequence: Synthetic oligonucleotide
  Description of Combined DNA/RNA Molecule: Synthetic oligonucleotide
aggcccaaggggcacagcucacgauaacggtacaaggctaaagcuutgctaacggucgagcaagaagccggggutccagc

SEQ ID NO: 2217 - DNA, 20 bp, Artificial Sequence
  Description of Artificial Sequence: Synthetic primer
gagaaaaaggcccttgagga

SEQ ID NO: 2218 - DNA, 20 bp, Artificial Sequence
  Description of Artificial Sequence: Synthetic primer
ctaagtgttttgagaggaaa

SEQ ID NO: 2219 - DNA, 236 bp, Artificial Sequence
  Description of Artificial Sequence: Synthetic polynucleotide
tcctcaagggcctttttctccttgtctcttagcgacatatgcagctgctgttttgttccgaatgtctgaggacaagccacaagattacaagaaacggctttcagttgagctgaccagctctctcttcagaacagagccaatggcttggaatgaggtagggaaatgtgagcagttatttatctggtagtttcctagagcaggtatggcagcttgttctttcctctcaaaacacttag

SEQ ID NO: 2220 - DNA, 80 bp, Artificial Sequence
  Description of Artificial Sequence: Synthetic oligonucleotide
  Description of Combined DNA/RNA Molecule: Synthetic oligonucleotide
gagaaaaaggcccutgaggaacgauaacggtacaaggctaaagcuutgctaacggucgagctaagtgttutgagaggaaa

SEQ ID NO: 2221 - DNA, 20 bp, Artificial Sequence
  Description of Artificial Sequence: Synthetic primer
gtcccaccctgtgacactgc

SEQ ID NO: 2222 - DNA, 20 bp, Artificial Sequence
  Description of Artificial Sequence: Synthetic primer
caagtccaggatcttgtcgg

SEQ ID NO: 2223 - DNA, 237 bp, Artificial Sequence
  Description of Artificial Sequence: Synthetic polynucleotide
gcagtgtcacagggtgggacaggactctgccctgctgcgcttccagtctcggggaccatggcatgagtgagatgggctgaacaaaagttcagttctgtgagagaaaccctgcagcctctcccctgtgcaggttacaatgagtggagggagttctgcggcctgcctcgcctggagacccccgctgacctgagcacagccatcgccagcaggagcgtggccgacaagatcctggacttg

SEQ ID NO: 2224 - DNA, 80 bp, Artificial Sequence
  Description of Artificial Sequence: Synthetic oligonucleotide
  Description of Combined DNA/RNA Molecule: Synthetic oligonucleotide
gtcccacccugtgacactgcacgauaacggtacaaggctaaagcuutgctaacggucgagcaagtccaggaucttgtcgg

SEQ ID NO: 2225 - DNA, 20 bp, Artificial Sequence
  Description of Artificial Sequence: Synthetic primer
acttgtttctttttattcaa

SEQ ID NO: 2226 - DNA, 20 bp, Artificial Sequence
  Description of Artificial Sequence: Synthetic primer
cataaagcattttttgctaa

SEQ ID NO: 2227 - DNA, 238 bp, Artificial Sequence
  Description of Artificial Sequence: Synthetic polynucleotide
ttgaataaaaagaaacaagttgtttatcccatctctcctttttctccctagactgtgaaagcactaaaccacttaaaagaaaacttgaaaattattcacagaggtgggtatggattggtattttttgtaatagaaattaacttttttctcctaattggtgaaacggttattgaaaattacagtgtcactgtataaactttcctaaaatatttgtatttttagcaaaaaatgctttatg

SEQ ID NO: 2228 - DNA, 80 bp, Artificial Sequence
  Description of Artificial Sequence: Synthetic oligonucleotide
  Description of Combined DNA/RNA Molecule: Synthetic oligonucleotide
acttgtttcuttttattcaaacgauaacggtacaaggctaaagcuutgctaacggucgagcataaagcautttttgctaa

SEQ ID NO: 2229 - DNA, 20 bp, Artificial Sequence
  Description of Artificial Sequence: Synthetic primer
tcatagacactgaaaaattt

SEQ ID NO: 2230 - DNA, 20 bp, Artificial Sequence
  Description of Artificial Sequence: Synthetic primer
caaatagtagttctgtagcc

SEQ ID NO: 2231 - DNA, 238 bp, Artificial Sequence
  Description of Artificial Sequence: Synthetic polynucleotide
aaatttttcagtgtctatgacaatagttagcacacagacatttcaacaactcagaagaaaatttgaaattaagatttgagctagagcagtagaaataacatgaaaaacagatttgggaaacattttgtagttaaaaatcaatgagcttacctttgtttataaagataaaatccaaatcctgcaaatataagtgcaaaaaaaggcacaagaatagcaatggctacagaactactatttg

SEQ ID NO: 2232 - DNA, 80 bp, Artificial Sequence
  Description of Artificial Sequence: Synthetic oligonucleotide
  Description of Combined DNA/RNA Molecule: Synthetic oligonucleotide
tcatagacacugaaaaatttacgauaacggtacaaggctaaagcuutgctaacggucgagcaaatagtagutctgtagcc

SEQ ID NO: 2233 - DNA, 20 bp, Artificial Sequence
  Description of Artificial Sequence: Synthetic primer
agcaatccactgaaaaatac

SEQ ID NO: 2234 - DNA, 20 bp, Artificial Sequence
  Description of Artificial Sequence: Synthetic primer
catgaaatcagggaatgtca

SEQ ID NO: 2235 - DNA, 238 bp, Artificial Sequence
  Description of Artificial Sequence: Synthetic polynucleotide
gtatttttcagtggattgctaataacaattacttgtcccaaagcagaagtaaaaccagatgctttggaatgagtgttagaacattcatagacagtaaaacagaaaggactataatgacagttaaccctgccaggagcctgaagatcctacctgaggcagctgctttgagattcgtcggaacacatgataatagaggtcccaggcttgggtgaggtccttgacattccctgatttcatg

SEQ ID NO: 2236 - DNA, 80 bp, Artificial Sequence
  Description of Artificial Sequence: Synthetic oligonucleotide
  Description of Combined DNA/RNA Molecule: Synthetic oligonucleotide
agcaatccacugaaaaatacacgauaacggtacaaggctaaagcuutgctaacggucgagcatgaaaucagggaatgtca

SEQ ID NO: 2237 - DNA, 20 bp, Artificial Sequence
  Description of Artificial Sequence: Synthetic primer
agaaatttagttcattcatt

SEQ ID NO: 2238 - DNA, 20 bp, Artificial Sequence
  Description of Artificial Sequence: Synthetic primer
cctcctccaggctgagaata

SEQ ID NO: 2239 - DNA, 238 bp, Artificial Sequence
  Description of Artificial Sequence: Synthetic polynucleotide
aatgaatgaactaaatttctattgcaatacattacctcttatgatttgtcctatgttgtaagctacttccaataatttttggatttgagagtagactgaataacttaaacaaaatttaggactctttgttctttgtatcttttcataaagggcatgatgccattgtcacactcctgaagcattataagagaccacaagatgaattgccctgtaatgaatattctcagcctggaggagg

SEQ ID NO: 2240 - DNA, 80 bp, Artificial Sequence
  Description of Artificial Sequence: Synthetic oligonucleotide
  Description of Combined DNA/RNA Molecule: Synthetic oligonucleotide
agaaatttagutcattcattacgauaacggtacaaggctaaagcuutgctaacggucgagcctcctccaggcugagaata

SEQ ID NO: 2241 - DNA, 20 bp, Artificial Sequence
  Description of Artificial Sequence: Synthetic primer
ggtttccctaaggtgtgatc

SEQ ID NO: 2242 - DNA, 20 bp, Artificial Sequence
  Description of Artificial Sequence: Synthetic primer
caccctaaacatttttcctt

SEQ ID NO: 2243 - DNA, 238 bp, Artificial Sequence
  Description of Artificial Sequence: Synthetic polynucleotide
gatcacaccttagggaaacctctgtcttggctttgctttgtttaatttcagaaagaagacaaattagctcgcttagagaaagctatcaaccccttgctggatgatgatgaccaagtggcgttttctttcattctggacaacattgtcacccagaaaatgatggcagttccagatgtaagctgtctctgtgccaaatactgtgaggatcgtgcaggggaaaggaaaaatgtttagggtg

SEQ ID NO: 2244 - DNA, 80 bp, Artificial Sequence
  Description of Artificial Sequence: Synthetic oligonucleotide
  Description of Combined DNA/RNA Molecule: Synthetic oligonucleotide
ggtttcccuaaggtgtgatcacgauaacggtacaaggctaaagcuutgctaacggucgagcaccctaaacauttttcctt

SEQ ID NO: 2245 - DNA, 20 bp, Artificial Sequence
  Description of Artificial Sequence: Synthetic primer
acagaccttacccccaacca

SEQ ID NO: 2246 - DNA, 20 bp, Artificial Sequence
  Description of Artificial Sequence: Synthetic primer
cttatttttttcctatttac

SEQ ID NO: 2247 - DNA, 238 bp, Artificial Sequence
  Description of Artificial Sequence: Synthetic polynucleotide
tggttgggggtaaggtctgtatcctgaatgaaatgaataggctttcattacctttccagggatagttttgttatcattcatatcctgtctgtgttttcactgtcaatagagtcagtttaattaatttatatgttttattctttatttcagaaaaactatacaactccagcggacgagatttgagaagggccctcttctccctgaagcagatatttcaggtaaataggaaaaaaataag

SEQ ID NO: 2248 - DNA, 80 bp, Artificial Sequence
  Description of Artificial Sequence: Synthetic oligonucleotide
  Description of Combined DNA/RNA Molecule: Synthetic oligonucleotide
acagacctuacccccaaccaacgauaacggtacaaggctaaagcuutgctaacggucgagcttatttttutcctatttac

SEQ ID NO: 2249 - DNA, 20 bp, Artificial Sequence
  Description of Artificial Sequence: Synthetic primer
ccaggagtttgagaccagcc

SEQ ID NO: 2250 - DNA, 20 bp, Artificial Sequence
  Description of Artificial Sequence: Synthetic primer
ctcgacattgaacacaaaac

SEQ ID NO: 2251 - DNA, 238 bp, Artificial Sequence
  Description of Artificial Sequence: Synthetic polynucleotide
ctcgacattgaacacaaaacactgaacctctgggaggggcagagtggaaacactgagggagtcagtgggcatagtggtcaggaagaaatctagattggggagaaaatgaaggcagggagggaaagagaaatgatggtcagaaggaggaggccaagcacggtggctcatgtctgtaatcctggtgctttgaaaggctgaggcaggaggatcactagaggccaggagtttgagaccagcc

SEQ ID NO: 2252 - DNA, 80 bp, Artificial Sequence
  Description of Artificial Sequence: Synthetic oligonucleotide
  Description of Combined DNA/RNA Molecule: Synthetic oligonucleotide
ccaggagttugagaccagccacgauaacggtacaaggctaaagcuutgctaacggucgagctcgacatugaacacaaaac

SEQ ID NO: 2253 - DNA, 20 bp, Artificial Sequence
  Description of Artificial Sequence: Synthetic primer
aaaggaaaggaggtttgagc

SEQ ID NO: 2254 - DNA, 20 bp, Artificial Sequence
  Description of Artificial Sequence: Synthetic primer
cacagtgacaattgagggga

SEQ ID NO: 2255 - DNA, 238 bp, Artificial Sequence
  Description of Artificial Sequence: Synthetic polynucleotide
cacagtgacaattgaggggatgattaagctggccttgtctgctgctagtgggctggcacacctgcacatggagatcgtgggcacccaaggtgagtggactagcgcaggagcggcgaagtggtgtaggcatgaaaggtccgcagtgtcctgatttagttcctagaattcctttttactgaggaagttggggctggacctcaggaactctagtttaatttaaaggaaaggaggtttgagc

SEQ ID NO: 2256 - DNA, 80 bp, Artificial Sequence
  Description of Artificial Sequence: Synthetic oligonucleotide
  Description of Combined DNA/RNA Molecule: Synthetic oligonucleotide
aaaggaaaggagguttgagcacgauaacggtacaaggctaaagcuutgctaacggucgagcacagtgacaautgagggga

SEQ ID NO: 2257 - DNA, 20 bp, Artificial Sequence
  Description of Artificial Sequence: Synthetic primer
ccctgtgttgcagcgctcat

SEQ ID NO: 2258 - DNA, 20 bp, Artificial Sequence
  Description of Artificial Sequence: Synthetic primer
cagcaacaactttgggccca

SEQ ID NO: 2259 - DNA, 239 bp, Artificial Sequence
  Description of Artificial Sequence: Synthetic polynucleotide
atgagcgctgcaacacagggaagtctcgaggacggctagatatctgtcaaaaaaagaggagagccgggcttgcctgacgttggcagcagcaggcaggccgggcccggcgggcacccgtgtgcatgctgcccggagcggacgggcacctaccggtcacatagggccccaggggcatctggttgtagttgacaatccctcccggtccagggccccggaagttgggcccaaagttgttgctg

SEQ ID NO: 2260 - DNA, 80 bp, Artificial Sequence
  Description of Artificial Sequence: Synthetic oligonucleotide
  Description of Combined DNA/RNA Molecule: Synthetic oligonucleotide
ccctgtgtugcagcgctcatacgauaacggtacaaggctaaagcuutgctaacggucgagcagcaacaacuttgggccca

SEQ ID NO: 2261 - DNA, 20 bp, Artificial Sequence
  Description of Artificial Sequence: Synthetic primer
aaggagattcatttcagatg

SEQ ID NO: 2262 - DNA, 20 bp, Artificial Sequence
  Description of Artificial Sequence: Synthetic primer
cgggaaggcatagtggcaca

SEQ ID NO: 2263 - DNA, 239 bp, Artificial Sequence
  Description of Artificial Sequence: Synthetic polynucleotide
catctgaaatgaatctccttctctgggccttgtctgtttcagcacggcggattccttgcaatgtgtgtttatatctgatatccgttgactagataaccaaagaagataaaccctggcctctgggagttaataattgtgtttgttttccagctgccttcactatgattggcacttccagtcacttatctgataagtgttctcagttcgccattccttccctgtgccactatgccttcccg

SEQ ID NO: 2264 - DNA, 80 bp, Artificial Sequence
  Description of Artificial Sequence: Synthetic oligonucleotide
  Description of Combined DNA/RNA Molecule: Synthetic oligonucleotide
aaggagatucatttcagatgacgauaacggtacaaggctaaagcuutgctaacggucgagcgggaaggcauagtggcaca

SEQ ID NO: 2265 - DNA, 20 bp, Artificial Sequence
  Description of Artificial Sequence: Synthetic primer
agaggaatatatttaaaata

SEQ ID NO: 2266 - DNA, 20 bp, Artificial Sequence
  Description of Artificial Sequence: Synthetic primer
ctcagtttttccataaaact

SEQ ID NO: 2267 - DNA, 240 bp, Artificial Sequence
  Description of Artificial Sequence: Synthetic polynucleotide
tattttaaatatattcctcttatgtgttcgctttccttgatttacctccaggttctgtggctataagtcaaaacatggggcagatgaaaaaagacttcattttggcaatgggcattgtaagtttctaaacttggctttttgttttgcttcaccgttttagctttagcagttattgatttacaattggttaacttcctcctgacaaagagacttcaaaagtagttttatggaaaaactgag

SEQ ID NO: 2268 - DNA, 80 bp, Artificial Sequence
  Description of Artificial Sequence: Synthetic oligonucleotide
  Description of Combined DNA/RNA Molecule: Synthetic oligonucleotide
agaggaatauatttaaaataacgauaacggtacaaggctaaagcuutgctaacggucgagctcagttttuccataaaact

SEQ ID NO: 2269 - DNA, 20 bp, Artificial Sequence
  Description of Artificial Sequence: Synthetic primer
tcattttttggcttaccgta

SEQ ID NO: 2270 - DNA, 20 bp, Artificial Sequence
  Description of Artificial Sequence: Synthetic primer
ctcagatatttatccaaaca

SEQ ID NO: 2271 - DNA, 240 bp, Artificial Sequence
  Description of Artificial Sequence: Synthetic polynucleotide
ctcagatatttatccaaacattattgctatgggatttcctgcagaaagacttgaaggcgtatacaggaacaatattgatgatgtagtaaggtaagaatgctttgattttctatttcaaatattgatgtttatattcatgttgtgttttcatttagaaaagatttctaagccacagaaaaagatactttgtgatgtaaactattattgtagtgctctataatcattttttggcttaccgta

SEQ ID NO: 2272 - DNA, 80 bp, Artificial Sequence
  Description of Artificial Sequence: Synthetic oligonucleotide
  Description of Combined DNA/RNA Molecule: Synthetic oligonucleotide
tcatttttuggcttaccgtaacgauaacggtacaaggctaaagcuutgctaacggucgagctcagatatutatccaaaca

SEQ ID NO: 2273 - DNA, 20 bp, Artificial Sequence
  Description of Artificial Sequence: Synthetic primer
ttttcaaggtttaagcccat

SEQ ID NO: 2274 - DNA, 20 bp, Artificial Sequence
  Description of Artificial Sequence: Synthetic primer
ctggccaaagattcaaagcc

SEQ ID NO: 2275 - DNA, 241 bp, Artificial Sequence
  Description of Artificial Sequence: Synthetic polynucleotide
atgggcttaaaccttgaaaaatcaattttttttttttagatattcccattattatagagatgattgttgaattttccttttggggaagaaaagtgttttgaaatgtgttttataatttagactagtgaatatttttctttgttttttaaggaacactgtccattggcatggggaaatataaacttgtttgattacacagacactctagtatctggaaaaatggctttgaatctttggccag

SEQ ID NO: 2276 - DNA, 80 bp, Artificial Sequence
  Description of Artificial Sequence: Synthetic oligonucleotide
  Description of Combined DNA/RNA Molecule: Synthetic oligonucleotide
ttttcaagguttaagcccatacgauaacggtacaaggctaaagcuutgctaacggucgagctggccaaagautcaaagcc

SEQ ID NO: 2277 - DNA, 20 bp, Artificial Sequence
  Description of Artificial Sequence: Synthetic primer
tcatgccctggagaagcctt

SEQ ID NO: 2278 - DNA, 20 bp, Artificial Sequence
  Description of Artificial Sequence: Synthetic primer
cgctcaacgcggcagctgtg

SEQ ID NO: 2279 - DNA, 241 bp, Artificial Sequence
  Description of Artificial Sequence: Synthetic polynucleotide
aaggcttctccagggcatgaccgagctgatggctcctgggtctctgcacaggcactgcgggtgatggggaagatgatgcgagagtgttggtatgccaacggcgcagcccgcctgacggccctgcgcatcaagaagaccctctcccagctcagcgtgcaggaagacgtgaagatctaactgctccctctctccacacggagctcctggcagcgagaactacgcacagctgccgcgttgagcg

SEQ ID NO: 2280 - DNA, 80 bp, Artificial Sequence
  Description of Artificial Sequence: Synthetic oligonucleotide
  Description of Combined DNA/RNA Molecule: Synthetic oligonucleotide
tcatgcccuggagaagccttacgauaacggtacaaggctaaagcuutgctaacggucgagcgctcaacgcggcagcugtg

SEQ ID NO: 2281 - DNA, 20 bp, Artificial Sequence
  Description of Artificial Sequence: Synthetic primer
ttgtagactatgtggtctct

SEQ ID NO: 2282 - DNA, 20 bp, Artificial Sequence
  Description of Artificial Sequence: Synthetic primer
ccaaattttcattccaatgg

SEQ ID NO: 2283 - DNA, 241 bp, Artificial Sequence
  Description of Artificial Sequence: Synthetic polynucleotide
agagaccacatagtctacaaaactggaaaaaagtttgccaatccctaatttacagccaaaaagctacacaaactcccatagccaagattacaagaatatcaagtagtaaagacaacagggacttcagaacagaaaagaagtatagttcaccttgacaattctgcagatgagcacatcatagcgctgatgattgattcggtgtcgcaccagaactttattcaccattggaatgaaaatttgg

SEQ ID NO: 2284 - DNA, 80 bp, Artificial Sequence
  Description of Artificial Sequence: Synthetic oligonucleotide
  Description of Combined DNA/RNA Molecule: Synthetic oligonucleotide
ttgtagacuatgtggtctctacgauaacggtacaaggctaaagcuutgctaacggucgagccaaatttucattccaatgg

SEQ ID NO: 2285 - DNA, 20 bp, Artificial Sequence
  Description of Artificial Sequence: Synthetic primer
tggcttagactctcttatgc

SEQ ID NO: 2286 - DNA, 20 bp, Artificial Sequence
  Description of Artificial Sequence: Synthetic primer
cacagtggtggcaggaggca

SEQ ID NO: 2287 - DNA, 241 bp, Artificial Sequence
  Description of Artificial Sequence: Synthetic polynucleotide
gcataagagagtctaagccaagtaagaatgagctgatttaattctttaaaggatggtggttagaaaatgtaaaagggaaacattaaaatataaaatgatagattatggactactgatgatttttcaaaacatttagtatgtagacaatacctgaacctcctttttaatacttcggatgcgaacatctctgccttctacaaagagttttgcagttgacacgttgcctcctgccaccactgtg

SEQ ID NO: 2288 - DNA, 80 bp, Artificial Sequence
  Description of Artificial Sequence: Synthetic oligonucleotide
  Description of Combined DNA/RNA Molecule: Synthetic oligonucleotide
tggcttagacuctcttatgcacgauaacggtacaaggctaaagcuutgctaacggucgagcacagtgguggcaggaggca

SEQ ID NO: 2289 - DNA, 20 bp, Artificial Sequence
  Description of Artificial Sequence: Synthetic primer
tacagaaagaatcttgaacc

SEQ ID NO: 2290 - DNA, 20 bp, Artificial Sequence
  Description of Artificial Sequence: Synthetic primer
ctcacctccacaaatgcaac

SEQ ID NO: 2291 - DNA, 241 bp, Artificial Sequence
  Description of Artificial Sequence: Synthetic polynucleotide
ggttcaagattctttctgtaagtgcaaaataatcttagaaaaaatacatttctgaattgatagtaacaggatttgcatttataattttcaaatgaaagacaatatgctaaaagatgaattttgtgatcatctgtaacatgtttttttcagctctgatgaagccttcagtaaagtcaatttaaattaccgcactgaaaatgggctgtctctacttcatttatgttgcatttgtggaggtgag

SEQ ID NO: 2292 - DNA, 80 bp, Artificial Sequence
  Description of Artificial Sequence: Synthetic oligonucleotide
  Description of Combined DNA/RNA Molecule: Synthetic oligonucleotide
tacagaaagaaucttgaaccacgauaacggtacaaggctaaagcuutgctaacggucgagctcaccuccacaaatgcaac

SEQ ID NO: 2293 - DNA, 20 bp, Artificial Sequence
  Description of Artificial Sequence: Synthetic primer
ctcaccacctcaccccagta

SEQ ID NO: 2294 - DNA, 20 bp, Artificial Sequence
  Description of Artificial Sequence: Synthetic primer
cctacgttatttaagaagat

SEQ ID NO: 2295 - DNA, 241 bp, Artificial Sequence
  Description of Artificial Sequence: Synthetic polynucleotide
cctacgttatttaagaagatccgagggggtgtcttttatatcccagaatatctcaatcgttctgtcgccactctcctgatgcatatgctgcaggttgacccactgaaacgagcaactatcaaagacataaggtgatttttctttttgtttctgttctgcatattttctcataggaataataatgttaattaaatgattctcccaaagtctcatttcctgccctcaccacctcaccccagta

SEQ ID NO: 2296 - DNA, 80 bp, Artificial Sequence
  Description of Artificial Sequence: Synthetic oligonucleotide
  Description of Combined DNA/RNA Molecule: Synthetic oligonucleotide
ctcaccaccucaccccagtaacgauaacggtacaaggctaaagcuutgctaacggucgagcctacgttauttaagaagat

SEQ ID NO: 2297 - DNA, 20 bp, Artificial Sequence
  Description of Artificial Sequence: Synthetic primer
ctacttattaaagttgaaga

SEQ ID NO: 2298 - DNA, 20 bp, Artificial Sequence
  Description of Artificial Sequence: Synthetic primer
ctgttcggcttcatctttca

SEQ ID NO: 2299 - DNA, 242 bp, Artificial Sequence
  Description of Artificial Sequence: Synthetic polynucleotide
ctgttcggcttcatctttcagatcatccacaatcctggatataatttctgctgcacctactttgtttgccaactccacagtagtatcaactaactaaaaagaacagaaaaacaaaaaaccttttagactgcttttccaaggaaataaagcaacatcatgaaaaccaaatactctaaatatactacttatttagctaataaacatggtaagaatgattcattgctacttattaaagttgaaga

SEQ ID NO: 2300 - DNA, 80 bp, Artificial Sequence
  Description of Artificial Sequence: Synthetic oligonucleotide
  Description of Combined DNA/RNA Molecule: Synthetic oligonucleotide
ctacttatuaaagttgaagaacgauaacggtacaaggctaaagcuutgctaacggucgagctgttcggcutcatctttca

SEQ ID NO: 2301 - DNA, 20 bp, Artificial Sequence
  Description of Artificial Sequence: Synthetic primer
atcttttaattgcagatttg

SEQ ID NO: 2302 - DNA, 20 bp, Artificial Sequence
  Description of Artificial Sequence: Synthetic primer
caatatgtattcagagtatc

SEQ ID NO: 2303 - DNA, 242 bp, Artificial Sequence
  Description of Artificial Sequence: Synthetic polynucleotide
caatatgtattcagagtatccccttttttaggcatgcatgagagatattccaacgtgcaagtggctggaccagtggacagaactagctcaaaggtatgtcctaaattaaatataagttgtaaaaatatgcatattgttgaaaatacagctattactgtatgatcaatgttataatttattatttagtatatataaacacaaaggtttttataagttctgtggatcttttaattgcagatttg

SEQ ID NO: 2304 - DNA, 80 bp, Artificial Sequence
  Description of Artificial Sequence: Synthetic oligonucleotide
  Description of Combined DNA/RNA Molecule: Synthetic oligonucleotide
atcttttaautgcagatttgacgauaacggtacaaggctaaagcuutgctaacggucgagcaatatgtautcagagtatc

SEQ ID NO: 2305 - DNA, 20 bp, Artificial Sequence
  Description of Artificial Sequence: Synthetic primer
cactggggagccatgggtgg

SEQ ID NO: 2306 - DNA, 20 bp, Artificial Sequence
  Description of Artificial Sequence: Synthetic primer
cagggctgggcactgacccg

SEQ ID NO: 2307 - DNA, 242 bp, Artificial Sequence
  Description of Artificial Sequence: Synthetic polynucleotide
cagggctgggcactgacccgccagcagctccaggccctgcttctcaagcgctttctgcttgcccgccgcagccgccgcggcctgttcgcccaggtgaggagggctagcaccagggagtcgcatgggagtccctgagttccctaccctggccgtccactcagtggcctaatccaaacccttacccccgtgtgtattcccaacccaaagcacatttattgagggcactggggagccatgggtgg

SEQ ID NO: 2308 - DNA, 80 bp, Artificial Sequence
  Description of Artificial Sequence: Synthetic oligonucleotide
  Description of Combined DNA/RNA Molecule: Synthetic oligonucleotide
cactggggagccaugggtggacgauaacggtacaaggctaaagcuutgctaacggucgagcagggcugggcactgacccg

SEQ ID NO: 2309 - DNA, 20 bp, Artificial Sequence
  Description of Artificial Sequence: Synthetic primer
catgatggggctgctccggc

SEQ ID NO: 2310 - DNA, 20 bp, Artificial Sequence
  Description of Artificial Sequence: Synthetic primer
ctcacaacggtcacgtttgc

SEQ ID NO: 2311 - DNA, 243 bp, Artificial Sequence
  Description of Artificial Sequence: Synthetic polynucleotide
gccggagcagccccatcatgccgagggagcgcagggagcggtgagtgcccgcgccgcggggccggacgggacgggacgggacgggacgggtggcgtgggggaggggcggccgcgggtgctcacccggcccggtgccacccgggtccacagggatgcgaaggagcgggacaccatgaaggaggacggcggcgcggagttctcggctcgctccaggaagaggaaggcaaacgtgaccgttgtgag

SEQ ID NO: 2312 - DNA, 80 bp, Artificial Sequence
  Description of Artificial Sequence: Synthetic oligonucleotide
  Description of Combined DNA/RNA Molecule: Synthetic oligonucleotide
catgatggggcugctccggcacgauaacggtacaaggctaaagcuutgctaacggucgagctcacaacggucacgtttgc

SEQ ID NO: 2313 - DNA, 20 bp, Artificial Sequence
  Description of Artificial Sequence: Synthetic primer
attccaataaaacacttttc

SEQ ID NO: 2314 - DNA, 20 bp, Artificial Sequence
  Description of Artificial Sequence: Synthetic primer
ccagtttgaaagtcaggagg

SEQ ID NO: 2315 - DNA, 243 bp, Artificial Sequence
  Description of Artificial Sequence: Synthetic polynucleotide
ccagtttgaaagtcaggaggattttaatgaaaatgatttattttacttttcttacttttcaggacctgtagatgaatacatgttgccatttgaggaggaaattggccagcatccatctcttgaagacatgcaggaagttgttgtgcataaaaaaaagaggcctgttttaagagattattggcagaaacatgctgtaagttatccagttagcttttcatttgaaattccaataaaacacttttc

SEQ ID NO: 2316 - DNA, 80 bp, Artificial Sequence
  Description of Artificial Sequence: Synthetic oligonucleotide
  Description of Combined DNA/RNA Molecule: Synthetic oligonucleotide
attccaauaaaacacttttcacgauaacggtacaaggctaaagcuutgctaacggucgagccagttugaaagtcaggagg

SEQ ID NO: 2317 - DNA, 20 bp, Artificial Sequence
  Description of Artificial Sequence: Synthetic primer
aagaacagaaaaaaatgtaa

SEQ ID NO: 2318 - DNA, 20 bp, Artificial Sequence
  Description of Artificial Sequence: Synthetic primer
cacctactggtgggagcatg

SEQ ID NO: 2319 - DNA, 243 bp, Artificial Sequence
  Description of Artificial Sequence: Synthetic polynucleotide
ttacatttttttctgttcttctcatgttccctttcatcattattgccatgcatttaactcattgtgatgtgttaccactgatatttattttttaacgcttttatttacgtatttatttgtttgtttcatttggtgggtttttaaacccagatcccactgacccagttgattattatcctttgcttgatgatttccccacctcggtcccagatctctccacccccatgctcccaccagtaggtg

SEQ ID NO: 2320 - DNA, 80 bp, Artificial Sequence
  Description of Artificial Sequence: Synthetic oligonucleotide
  Description of Combined DNA/RNA Molecule: Synthetic oligonucleotide
aagaacagaaaaaaaugtaaacgauaacggtacaaggctaaagcuutgctaacggucgagcacctactggugggagcatg

SEQ ID NO: 2321 - DNA, 20 bp, Artificial Sequence
  Description of Artificial Sequence: Synthetic primer
aataggtagacgattgcagt

SEQ ID NO: 2322 - DNA, 20 bp, Artificial Sequence
  Description of Artificial Sequence: Synthetic primer
catatttcctctgatgatct

SEQ ID NO: 2323 - DNA, 243 bp, Artificial Sequence
  Description of Artificial Sequence: Synthetic polynucleotide
actgcaatcgtctacctattttacagttgttgagcactcgtgtgcattagggttcaactgggcgtcctagggctccctggacccattttagaccttgagttcttgagttcctcaaaagagaaatcacgcatttatgttttctcttcttagaccatccaggaggtggctggttatgtcctcattgccctcaacacagtggagcgaattcctttggaaaacctgcagatcatcagaggaaatatg

SEQ ID NO: 2324 - DNA, 80 bp, Artificial Sequence
  Description of Artificial Sequence: Synthetic oligonucleotide
  Description of Combined DNA/RNA Molecule: Synthetic oligonucleotide
aatagguagacgattgcagtacgauaacggtacaaggctaaagcuutgctaacggucgagcatatttccuctgatgatct

SEQ ID NO: 2325 - DNA, 20 bp, Artificial Sequence
  Description of Artificial Sequence: Synthetic primer
tccttttgattgtctaacac

SEQ ID NO: 2326 - DNA, 20 bp, Artificial Sequence
  Description of Artificial Sequence: Synthetic primer
cggtcagtccaaaggccaca

SEQ ID NO: 2327 - DNA, 243 bp, Artificial Sequence
  Description of Artificial Sequence: Synthetic polynucleotide
cggtcagtccaaaggccacatcaacccctacctcgtcctggagtgcgcctggcgggtgtccaactggactgccatgaaggaggcgctggtgcaggtgagacgccccgggggcatccctgccgctgcctgggtcccttttcctgaagctgcaggtgtctcttgggagatttcccttagaacaagcattttggcagtggaaagacagcttttgggaaggaaaggttccttttgattgtctaacac

SEQ ID NO: 2328 - DNA, 80 bp, Artificial Sequence
  Description of Artificial Sequence: Synthetic oligonucleotide
  Description of Combined DNA/RNA Molecule: Synthetic oligonucleotide
tccttttgautgtctaacacacgauaacggtacaaggctaaagcuutgctaacggucgagcggtcaguccaaaggccaca

SEQ ID NO: 2329 - DNA, 20 bp, Artificial Sequence
  Description of Artificial Sequence: Synthetic primer
ggggcaggggtgtggtgtgg

SEQ ID NO: 2330 - DNA, 20 bp, Artificial Sequence
  Description of Artificial Sequence: Synthetic primer
catgaaattcatcagttttg

SEQ ID NO: 2331 - DNA, 243 bp, Artificial Sequence
  Description of Artificial Sequence: Synthetic polynucleotide
ccacaccacacccctgcccctgccatgcctggcccactctcctcccagttctcaccccacagcagggcgggatcactagctctagaagcccagcggctgcttctggctggatcaaagcctcttatgtcatccttgttcctttattcccaggtgaaatgtaacgagcagcctaacagagtggaaatctacgagaaaaccgtggaggttctggagcctgaggtcacaaaactgatgaatttcatg

SEQ ID NO: 2332 - DNA, 80 bp, Artificial Sequence
  Description of Artificial Sequence: Synthetic oligonucleotide
  Description of Combined DNA/RNA Molecule: Synthetic oligonucleotide
ggggcaggggugtggtgtggacgauaacggtacaaggctaaagcuutgctaacggucgagcatgaaatucatcagttttg

SEQ ID NO: 2333 - DNA, 20 bp, Artificial Sequence
  Description of Artificial Sequence: Synthetic primer
ggaggcttgcacactgtgta

SEQ ID NO: 2334 - DNA, 20 bp, Artificial Sequence
  Description of Artificial Sequence: Synthetic primer
ctcgactcccagagagcccc

SEQ ID NO: 2335 - DNA, 243 bp, Artificial Sequence
  Description of Artificial Sequence: Synthetic polynucleotide
ctcgactcccagagagccccctcgtcttactcctaatatgatcaatagtttcgtggttaataaccacagcaacagtgccggaggcggcggcaggggcaacaccaacaccaacgagtgccgcatggtcgacatgcacgggatgaaggtggcttcgttcctgatggacggccaggaactgatctgcctgccgcaagtctttgatctttttctcaagcacctggtgggaggcttgcacactgtgta

SEQ ID NO: 2336 - DNA, 80 bp, Artificial Sequence
  Description of Artificial Sequence: Synthetic oligonucleotide
  Description of Combined DNA/RNA Molecule: Synthetic oligonucleotide
ggaggctugcacactgtgtaacgauaacggtacaaggctaaagcuutgctaacggucgagctcgacucccagagagcccc

SEQ ID NO: 2337 - DNA, 20 bp, Artificial Sequence
  Description of Artificial Sequence: Synthetic primer
gccacaaggagaggttaaag

SEQ ID NO: 2338 - DNA, 20 bp, Artificial Sequence
  Description of Artificial Sequence: Synthetic primer
ctggagctcctcctccctac

SEQ ID NO: 2339 - DNA, 244 bp, Artificial Sequence
  Description of Artificial Sequence: Synthetic polynucleotide
ctttaacctctccttgtggccctctcccacctcctgctggctcccgctcaggcctgggtttcagcattgctgggggtattggcaaccagcacatcccaggagacaacagcatctacatcaccaagatcattgaggggggtgctgctcagaaggatggacgcctacagattggggaccggctgctggcggtgagacagacttcatggggatgcccaaatggtagggtagggaggaggagctccag

SEQ ID NO: 2340 - DNA, 80 bp, Artificial Sequence
  Description of Artificial Sequence: Synthetic oligonucleotide
  Description of Combined DNA/RNA Molecule: Synthetic oligonucleotide
gccacaaggagaggutaaagacgauaacggtacaaggctaaagcuutgctaacggucgagctggagctccucctccctac

SEQ ID NO: 2341 - DNA, 20 bp, Artificial Sequence
  Description of Artificial Sequence: Synthetic primer
tcctccttaatttaactaca

SEQ ID NO: 2342 - DNA, 20 bp, Artificial Sequence
  Description of Artificial Sequence: Synthetic primer
ccagacttgatagtgagcat

SEQ ID NO: 2343 - DNA, 244 bp, Artificial Sequence
  Description of Artificial Sequence: Synthetic polynucleotide
tgtagttaaattaaggaggaaatgatctttgttgaaatgtagcatgtgttctgcaaaacttttaattttgtagatgcaattaaacgtgaatttaaaaatattctctggtggtattaagataacatttcctatgtagaaattaatcattacctttgtagttaaccttgaaaccaacagatccaacactttcgtccgtttgaaggtgcagccacatttggctactcatgctcactatcaagtctgg

SEQ ID NO: 2344 - DNA, 80 bp, Artificial Sequence
  Description of Artificial Sequence: Synthetic oligonucleotide
  Description of Combined DNA/RNA Molecule: Synthetic oligonucleotide
tcctccttaauttaactacaacgauaacggtacaaggctaaagcuutgctaacggucgagccagacttgauagtgagcat

SEQ ID NO: 2345 - DNA, 20 bp, Artificial Sequence
  Description of Artificial Sequence: Synthetic primer
atttgcaatgttataacttc

SEQ ID NO: 2346 - DNA, 20 bp, Artificial Sequence
  Description of Artificial Sequence: Synthetic primer
cagctcgtggtagtggcaca

SEQ ID NO: 2347 - DNA, 244 bp, Artificial Sequence
  Description of Artificial Sequence: Synthetic polynucleotide
cagctcgtggtagtggcacagctccgtctgccgcacggatgggatatattcatacacgtgcacctctctgcacatggacatcattatgaggattcctgacatgaaaaccaaaaattagaacctaatgaacaactccatgtgagagggatgagttttttgggggaggggtggtggtgatgggatatgactgtggcaagagacacttacttttttgttgttgttgcatttgcaatgttataacttc

SEQ ID NO: 2348 - DNA, 80 bp, Artificial Sequence
  Description of Artificial Sequence: Synthetic oligonucleotide
  Description of Combined DNA/RNA Molecule: Synthetic oligonucleotide
atttgcaaugttataacttcacgauaacggtacaaggctaaagcuutgctaacggucgagcagctcgtgguagtggcaca

SEQ ID NO: 2349 - DNA, 20 bp, Artificial Sequence
  Description of Artificial Sequence: Synthetic primer
ggataatgaagacaacacgg

SEQ ID NO: 2350 - DNA, 20 bp, Artificial Sequence
  Description of Artificial Sequence: Synthetic primer
cctgccattcctggtatcgt

SEQ ID NO: 2351 - DNA, 244 bp, Artificial Sequence
  Description of Artificial Sequence: Synthetic polynucleotide
ccgtgttgtcttcattatcctcgcggactcctgcctgctttggggtgactcaagccatttgtctggtccttccttcctgtctttatgtggagacgtctcagctgtccagcaggcaactgactgtgtttttgaaatgactttatttttcagatgtcgaactctctcaggttcacccagaccaaagaattttaagaagattcattttatcaagaacatgcggcaacacgataccaggaatggcagg

SEQ ID NO: 2352 - DNA, 80 bp, Artificial Sequence
  Description of Artificial Sequence: Synthetic oligonucleotide
  Description of Combined DNA/RNA Molecule: Synthetic oligonucleotide
ggataaugaagacaacacggacgauaacggtacaaggctaaagcuutgctaacggucgagcctgccatucctggtatcgt

SEQ ID NO: 2353 - DNA, 20 bp, Artificial Sequence
  Description of Artificial Sequence: Synthetic primer
gattacaggttggtaaagta

SEQ ID NO: 2354 - DNA, 20 bp, Artificial Sequence
  Description of Artificial Sequence: Synthetic primer
cctttgacgtgagaattgga

SEQ ID NO: 2355 - DNA, 244 bp, Artificial Sequence
  Description of Artificial Sequence: Synthetic polynucleotide
tactttaccaacctgtaatcaaaaaacagctcttcgccagtctggatggctctcttggcaaaaatacctatcctgtgatcaccgttaaccatcataactgcaaagagacacactggtgtcagtgagcatgaagacgggccacggggggttaactgacttgttcacataacaaacaactatcccagaagtattcaagtccatcatcacaggactgaaaagggagttccaattctcacgtcaaagg

SEQ ID NO: 2356 - DNA, 80 bp, Artificial Sequence
  Description of Artificial Sequence: Synthetic oligonucleotide
  Description of Combined DNA/RNA Molecule: Synthetic oligonucleotide
gattacaggutggtaaagtaacgauaacggtacaaggctaaagcuutgctaacggucgagcctttgacgugagaattgga

SEQ ID NO: 2357 - DNA, 20 bp, Artificial Sequence
  Description of Artificial Sequence: Synthetic primer
tgaaggaatagcacacctat

SEQ ID NO: 2358 - DNA, 20 bp, Artificial Sequence
  Description of Artificial Sequence: Synthetic primer
caaggaatgactggaaatat

SEQ ID NO: 2359 - DNA, 245 bp, Artificial Sequence
  Description of Artificial Sequence: Synthetic polynucleotide
caaggaatgactggaaatattcaatttgacacttatggacgtaggacaaattataccatcgatgtgtatgaaatgaaagtcagtggctctcgaaaagtaagtaaccaaaacagacatttaaagaaaaggactcttgaaagaggacagcatttggatgtaagaaaataagtattattattttacaaaatatcagtaaggatgagtgggagatgggaacctccaggatgaaggaatagcacacctat

SEQ ID NO: 2360 - DNA, 80 bp, Artificial Sequence
  Description of Artificial Sequence: Synthetic oligonucleotide
  Description of Combined DNA/RNA Molecule: Synthetic oligonucleotide
tgaaggaauagcacacctatacgauaacggtacaaggctaaagcuutgctaacggucgagcaaggaaugactggaaatat

SEQ ID NO: 2361 - DNA, 20 bp, Artificial Sequence
  Description of Artificial Sequence: Synthetic primer
ttcaatcctcggcttctcgg

SEQ ID NO: 2362 - DNA, 20 bp, Artificial Sequence
  Description of Artificial Sequence: Synthetic primer
cttgctttttctttgaagtg

SEQ ID NO: 2363 - DNA, 245 bp, Artificial Sequence
  Description of Artificial Sequence: Synthetic polynucleotide
cttgctttttctttgaagtggtttttttttctaaactgctggtgaaagacgccggattgacagccctggagactgaagtcctctatttatccacagagcagacactgcagcacgggcagcggcagtgccagcttcgcccacactgcccctccgccagcgggcgtcaaccccgacttggaggagccacctctaaaggtgagaggggtagttcagtctccatgcccattcaatcctcggcttctcgg

SEQ ID NO: 2364 - DNA, 80 bp, Artificial Sequence
  Description of Artificial Sequence: Synthetic oligonucleotide
  Description of Combined DNA/RNA Molecule: Synthetic oligonucleotide
ttcaatccucggcttctcggacgauaacggtacaaggctaaagcuutgctaacggucgagcttgcttttuctttgaagtg

SEQ ID NO: 2365 - DNA, 20 bp, Artificial Sequence
  Description of Artificial Sequence: Synthetic primer
ggagttaaataagacggtaa

SEQ ID NO: 2366 - DNA, 20 bp, Artificial Sequence
  Description of Artificial Sequence: Synthetic primer
cattgagcagagaaaaccat

SEQ ID NO: 2367 - DNA, 245 bp, Artificial Sequence
  Description of Artificial Sequence: Synthetic polynucleotide
cattgagcagagaaaaccatgtgatacgatgaaagttggtggaaatctggattccaaaggctatggtgtggcaacccctaaaggctcagcattaaggtgggtggaataatataacaatatccgtgttgttatagtattccacctaccctgatgcattttgttgtcattttctttcttgtggattttgaggtaacttttaaaagtttaaaatctacaatattccatggagttaaataagacggtaa

SEQ ID NO: 2368 - DNA, 80 bp, Artificial Sequence
  Description of Artificial Sequence: Synthetic oligonucleotide
  Description of Combined DNA/RNA Molecule: Synthetic oligonucleotide
ggagttaaauaagacggtaaacgauaacggtacaaggctaaagcuutgctaacggucgagcatugagcagagaaaaccat

SEQ ID NO: 2369 - DNA, 20 bp, Artificial Sequence
  Description of Artificial Sequence: Synthetic primer
gctgctgctggcagctgggt

SEQ ID NO: 2370 - DNA, 20 bp, Artificial Sequence
  Description of Artificial Sequence: Synthetic primer
ctggtgaaaacaccgcagca

SEQ ID NO: 2371 - DNA, 245 bp, Artificial Sequence
  Description of Artificial Sequence: Synthetic polynucleotide
ctggtgaaaacaccgcagcatgtcaagatcacagattttgggctggccaaactgctgggtgcggaagagaaagaataccatgcagaaggaggcaaagtaaggaggtggctttaggtcagccagcattttcctgacaccagggaccaggctgccttcccactagctgtattgtttaacacatgcaggggaggatgctctccagacattctgggtgagctcgcagcagctgctgctggcagctgggt

SEQ ID NO: 2372 - DNA, 80 bp, Artificial Sequence
  Description of Artificial Sequence: Synthetic oligonucleotide
  Description of Combined DNA/RNA Molecule: Synthetic oligonucleotide
gctgctgcuggcagctgggtacgauaacggtacaaggctaaagcuutgctaacggucgagctggugaaaacaccgcagca

SEQ ID NO: 2373 - DNA, 20 bp, Artificial Sequence
  Description of Artificial Sequence: Synthetic primer
gaaggcctcagacctttcac

SEQ ID NO: 2374 - DNA, 20 bp, Artificial Sequence
  Description of Artificial Sequence: Synthetic primer
ctcacctggaagtaagtcca

SEQ ID NO: 2375 - DNA, 245 bp, Artificial Sequence
  Description of Artificial Sequence: Synthetic polynucleotide
gtgaaaggtctgaggccttcgggaaaaaaaaatgctaatttcatatcaaagactaaaattaaaaaacaacatatctttcacatttaagatactttcctactttgagtgttatattaagcagtctaattaaaaacaactcttactacttactgcttcatattccagttccgataaaagtctgaactgttctttccccaataatagtagcttgctccttcctgtgattggacttacttccaggtgag

SEQ ID NO: 2376 - DNA, 80 bp, Artificial Sequence
  Description of Artificial Sequence: Synthetic oligonucleotide
  Description of Combined DNA/RNA Molecule: Synthetic oligonucleotide
gaaggccucagacctttcacacgauaacggtacaaggctaaagcuutgctaacggucgagctcaccuggaagtaagtcca

SEQ ID NO: 2377 - DNA, 20 bp, Artificial Sequence
  Description of Artificial Sequence: Synthetic primer
tttgagaggtttacatccaa

SEQ ID NO: 2378 - DNA, 20 bp, Artificial Sequence
  Description of Artificial Sequence: Synthetic primer
cgatgaactgttatcatcac

SEQ ID NO: 2379 - DNA, 245 bp, Artificial Sequence
  Description of Artificial Sequence: Synthetic polynucleotide
ttggatgtaaacctctcaaaaaatgaatcagagcgtcaatattgactttccccaaagacaaggatgtttagatattttaatttttttaaatgtcagttatgcaacaattttctaatactccagaggagttttaatgactacaaaagttaccttgccaatacacaagatcaggatgagacactacccaggcttttaatacacgcctaaattttgcatgaccttctggtgatgataacagttcatcg

SEQ ID NO: 2380 - DNA, 80 bp, Artificial Sequence
  Description of Artificial Sequence: Synthetic oligonucleotide
  Description of Combined DNA/RNA Molecule: Synthetic oligonucleotide
tttgagagguttacatccaaacgauaacggtacaaggctaaagcuutgctaacggucgagcgatgaacugttatcatcac

SEQ ID NO: 2381 - DNA, 20 bp, Artificial Sequence
  Description of Artificial Sequence: Synthetic primer
tgctgatcttcacttccaga

SEQ ID NO: 2382 - DNA, 20 bp, Artificial Sequence
  Description of Artificial Sequence: Synthetic primer
cactgcttggaagacagaat

SEQ ID NO: 2383 - DNA, 245 bp, Artificial Sequence
  Description of Artificial Sequence: Synthetic polynucleotide
cactgcttggaagacagaatatatgtagcaggagcatttttgcttggtattttttttttcctgttttcgtgtgtgtgtttcacttcattgcttaagcatgtcgttctttttttctctcttttattttatctcttggctttagcaaatgaaaaagttgaagatatcaatggatgtcctagaagtcagtctcagatggtaagaatcatatttattctcaatatataatgctgatcttcacttccaga

SEQ ID NO: 2384 - DNA, 80 bp, Artificial Sequence
  Description of Artificial Sequence: Synthetic oligonucleotide
  Description of Combined DNA/RNA Molecule: Synthetic oligonucleotide
tgctgatctucacttccagaacgauaacggtacaaggctaaagcuutgctaacggucgagcactgctuggaagacagaat

SEQ ID NO: 2385 - DNA, 20 bp, Artificial Sequence
  Description of Artificial Sequence: Synthetic primer
tcctacagaaggcagaagta

SEQ ID NO: 2386 - DNA, 20 bp, Artificial Sequence
  Description of Artificial Sequence: Synthetic primer
caaacttctaccatcacaaa

SEQ ID NO: 2387 - DNA, 245 bp, Artificial Sequence
  Description of Artificial Sequence: Synthetic polynucleotide
caaacttctaccatcacaaaacaggttgcaaccccaaaagcatgttagttttacaccgggggatgatatgccacgggtgtattgtgttgaagggacacctataaacttttccacagctacatctctaagtgatctaacaatcgaatcccctccaaatgagttagctgctggagaaggagttagaggaggggcacagtcaggtgaatttgaaaaacgagataccattcctacagaaggcagaagta

SEQ ID NO: 2388 - DNA, 80 bp, Artificial Sequence
  Description of Artificial Sequence: Synthetic oligonucleotide
  Description of Combined DNA/RNA Molecule: Synthetic oligonucleotide
tccuacagaaggcagaagtaacgauaacggtacaaggctaaagcuutgctaacggucgagcaaacttcuaccatcacaaa

SEQ ID NO: 2389 - DNA, 20 bp, Artificial Sequence
  Description of Artificial Sequence: Synthetic primer
accatattgtggaaaagagt

SEQ ID NO: 2390 - DNA, 20 bp, Artificial Sequence
  Description of Artificial Sequence: Synthetic primer
ctagaacagctactaattag

SEQ ID NO: 2391 - DNA, 246 bp, Artificial Sequence
  Description of Artificial Sequence: Synthetic polynucleotide
ctagaacagctactaattagcaaaatattttaccgtttctcttctgtagtaaatttctcagtcacggctgtggtttccttttcaaattcttctgacactaaaagaagacaaaagtttctcattgagatgagatgtttagtgacccctgcttagcactgacagttaaattgaccatataatctccccccaagttccaaaaagggacatcatttcaaggtgcacagaaaccatattgtggaaaagagt

SEQ ID NO: 2392 - DNA, 80 bp, Artificial Sequence
  Description of Artificial Sequence: Synthetic oligonucleotide
  Description of Combined DNA/RNA Molecule: Synthetic oligonucleotide
accatattguggaaaagagtacgauaacggtacaaggctaaagcuutgctaacggucgagctagaacagcuactaattag

SEQ ID NO: 2393 - DNA, 20 bp, Artificial Sequence
  Description of Artificial Sequence: Synthetic primer
gtgcttgtggggccaagtct

SEQ ID NO: 2394 - DNA, 20 bp, Artificial Sequence
  Description of Artificial Sequence: Synthetic primer
cagtgacgcacagccccaca

SEQ ID NO: 2395 - DNA, 246 bp, Artificial Sequence
  Description of Artificial Sequence: Synthetic polynucleotide
cagtgacgcacagccccacatccagtggctcaagcacgtggaggtgaatggcagcaaggtgggcccggacggcacaccctacgttaccgtgctcaaggtgggccaccgtgtgcacgtgggtgccgccgctggggctcctgggctggccccaagggtgccccttggctgcgggttgcgtgaggatttgggtctaggggttggagcttcgggggcagaagctgtgggggtgcttgtggggccaagtct

SEQ ID NO: 2396 - DNA, 80 bp, Artificial Sequence
  Description of Artificial Sequence: Synthetic oligonucleotide
  Description of Combined DNA/RNA Molecule: Synthetic oligonucleotide
gtgcttguggggccaagtctacgauaacggtacaaggctaaagcuutgctaacggucgagcagugacgcacagccccaca

SEQ ID NO: 2397 - DNA, 20 bp, Artificial Sequence
  Description of Artificial Sequence: Synthetic primer
atgtctagtattgaaactca

SEQ ID NO: 2398 - DNA, 20 bp, Artificial Sequence
  Description of Artificial Sequence: Synthetic primer
ccaaaggtagtaatttccgc

SEQ ID NO: 2399 - DNA, 246 bp, Artificial Sequence
  Description of Artificial Sequence: Synthetic polynucleotide
tgagtttcaatactagacatagaggaacaataacaaaaaatatacaaccaaagacttctccatttaagggttttgactataagctacctgcagctggctgtaatgtgatattgtcaacaaactacaaaatatttagaaaatcagacttactgcttcttgagttacttgtttctgtttcttagtaatttcttcagaaattctagtttcttgttctttggctttagctgcggaaattactacctttgg

SEQ ID NO: 2400 - DNA, 80 bp, Artificial Sequence
  Description of Artificial Sequence: Synthetic oligonucleotide
  Description of Combined DNA/RNA Molecule: Synthetic oligonucleotide
atgtctaguattgaaactcaacgauaacggtacaaggctaaagcuutgctaacggucgagccaaaggtaguaatttccgc

SEQ ID NO: 2401 - DNA, 20 bp, Artificial Sequence
  Description of Artificial Sequence: Synthetic primer
ctggtagaggtgatggtgga

SEQ ID NO: 2402 - DNA, 20 bp, Artificial Sequence
  Description of Artificial Sequence: Synthetic primer
cacagccgaggccgctagct

SEQ ID NO: 2403 - DNA, 246 bp, Artificial Sequence
  Description of Artificial Sequence: Synthetic polynucleotide
cacagccgaggccgctagcttttcagacatgatggatgtagtctatgtggctcagatgatccagaaatttttgggttatgtcgaccagatcaaagaggtgagactcagctggaactcaggagctcggaaaacgcccccatccctcatttgctcaagcctctctctcactccagctcctgggtcccaaaccccgcccctgccctcagcaacttccctgtccccccagctggtagaggtgatggtgga

SEQ ID NO: 2404 - DNA, 80 bp, Artificial Sequence
  Description of Artificial Sequence: Synthetic oligonucleotide
  Description of Combined DNA/RNA Molecule: Synthetic oligonucleotide
ctggtagaggugatggtggaacgauaacggtacaaggctaaagcuutgctaacggucgagcacagccgaggccgcuagct

SEQ ID NO: 2405 - DNA, 20 bp, Artificial Sequence
  Description of Artificial Sequence: Synthetic primer
aaacattcttggcaacagta

SEQ ID NO: 2406 - DNA, 20 bp, Artificial Sequence
  Description of Artificial Sequence: Synthetic primer
cttactaatcaagatcactc

SEQ ID NO: 2407 - DNA, 246 bp, Artificial Sequence
  Description of Artificial Sequence: Synthetic polynucleotide
cttactaatcaagatcactcttttaatgttttatagtgtcctgattcagcatgtaagcaggatttattagcctaccttcaacgaattgccttgtattgccatcagcttaatatctgcagcaaggtgaaggcagaagtgcagaatctgggaggagagctcattgtgtcaggggtaagctggacttgggcttcacaatgtaaagttcccaccgttgcacttccaaggcaaacattcttggcaacagta

SEQ ID NO: 2408 - DNA, 80 bp, Artificial Sequence
  Description of Artificial Sequence: Synthetic oligonucleotide
  Description of Combined DNA/RNA Molecule: Synthetic oligonucleotide
aaacattctuggcaacagtaacgauaacggtacaaggctaaagcuutgctaacggucgagcttactaaucaagatcactc

SEQ ID NO: 2409 - DNA, 20 bp, Artificial Sequence
  Description of Artificial Sequence: Synthetic primer
tgcatataattttattactg

SEQ ID NO: 2410 - DNA, 20 bp, Artificial Sequence
  Description of Artificial Sequence: Synthetic primer
cagttccattgcaaaaaagg

SEQ ID NO: 2411 - DNA, 247 bp, Artificial Sequence
  Description of Artificial Sequence: Synthetic polynucleotide
cagtaataaaattatatgcatataatatgttttataatctaaaagtcaatttgatacacatatagatgtaaatgtatttgaatacttgggagaaaaaatgcatataaattcttacccatgatagcattatttcttatccataatacttacgtatgcattcaggctgaatcccactccacgtaagatcagggaggcaggtgcgtgttgtagacccttggagaaggtgtccttttttgcaatggaactg

SEQ ID NO: 2412 - DNA, 80 bp, Artificial Sequence
  Description of Artificial Sequence: Synthetic oligonucleotide
  Description of Combined DNA/RNA Molecule: Synthetic oligonucleotide
tgcatataautttattactgacgauaacggtacaaggctaaagcuutgctaacggucgagcagttccatugcaaaaaagg

SEQ ID NO: 2413 - DNA, 20 bp, Artificial Sequence
  Description of Artificial Sequence: Synthetic primer
tagaaacatgaagttattaa

SEQ ID NO: 2414 - DNA, 20 bp, Artificial Sequence
  Description of Artificial Sequence: Synthetic primer
ctgacattgtgacatgctct

SEQ ID NO: 2415 - DNA, 247 bp, Artificial Sequence
  Description of Artificial Sequence: Synthetic polynucleotide
ctgacattgtgacatgctctcccaatgaacaggtcgtcatggagatggaggttattggccagttgatactaatttgattgatagaagcaccctaaatggtaagtatataaattaggtaatattgaattagttatattaattaaatggttaattcaagagtgtctggggcaaattttctatcaactacaagtgccaggaaccttggatttagtgtcttagtgggataatagaaacatgaagttattaa

SEQ ID NO: 2416 - DNA, 80 bp, Artificial Sequence
  Description of Artificial Sequence: Synthetic oligonucleotide
  Description of Combined DNA/RNA Molecule: Synthetic oligonucleotide
tagaaacaugaagttattaaacgauaacggtacaaggctaaagcuutgctaacggucgagctgacattgugacatgctct

SEQ ID NO: 2417 - DNA, 20 bp, Artificial Sequence
  Description of Artificial Sequence: Synthetic primer
gccttttaccagatcttatg

SEQ ID NO: 2418 - DNA, 20 bp, Artificial Sequence
  Description of Artificial Sequence: Synthetic primer
ctgaaccacatcattttgtt

SEQ ID NO: 2419 - DNA, 247 bp, Artificial Sequence
  Description of Artificial Sequence: Synthetic polynucleotide
cataagatctggtaaaaggcaaactatatgtttgaaaatcatgatatacagaatgaaactttaaaatctgatgaagcttacaaatactttatagtctttttttttacactttaagttctagggtaaatactttatagtcttttaacttacctaaacaaattgggattggataattccatcttcttacaggtcctggcatacatgtaatgtgagagtgaccctacataaacaaaatgatgtggttcag

SEQ ID NO: 2420 - DNA, 80 bp, Artificial Sequence
  Description of Artificial Sequence: Synthetic oligonucleotide
  Description of Combined DNA/RNA Molecule: Synthetic oligonucleotide
gcctttuaccagatcttatgacgauaacggtacaaggctaaagcuutgctaacggucgagctgaaccacaucattttgtt

SEQ ID NO: 2421 - DNA, 20 bp, Artificial Sequence
  Description of Artificial Sequence: Synthetic primer
tctggggcatttcttcattt

SEQ ID NO: 2422 - DNA, 20 bp, Artificial Sequence
  Description of Artificial Sequence: Synthetic primer
caccacactctgcacaattc

SEQ ID NO: 2423 - DNA, 247 bp, Artificial Sequence
  Description of Artificial Sequence: Synthetic polynucleotide
aaatgaagaaatgccccagaaagtaaaaagcactcatctccctttaattttggcacattattctggggaatgtatattatgttttccactacatattttcatttaattttcctctaaaatgttcctctgttgactttttttttcttttaggcataatttgttggactctaagatcaacaccctgttatcattgtgccaagatccaaatttgttaaatccaatccatggaattgtgcagagtgtggtg

SEQ ID NO: 2424 - DNA, 80 bp, Artificial Sequence
  Description of Artificial Sequence: Synthetic oligonucleotide
  Description of Combined DNA/RNA Molecule: Synthetic oligonucleotide
tctggggcauttcttcatttacgauaacggtacaaggctaaagcuutgctaacggucgagcaccacacuctgcacaattc

SEQ ID NO: 2425 - DNA, 20 bp, Artificial Sequence
  Description of Artificial Sequence: Synthetic primer
ttttgtttacgagcacagat

SEQ ID NO: 2426 - DNA, 20 bp, Artificial Sequence
  Description of Artificial Sequence: Synthetic primer
ctgagcacaacaaggaatgt

SEQ ID NO: 2427 - DNA, 247 bp, Artificial Sequence
  Description of Artificial Sequence: Synthetic polynucleotide
ctgagcacaacaaggaatgtctaatcaatatttccaaatacaagttttctttggttataagcggcctcactactattttaaagaatgttaacaatatggtgagtatttgggttactgtgttttggggaatttgctttcttttctttttgattaaaaagtttagaacagcatattttgaagtatggaaagtgattttctgtggactttggatataaccattaatcttattttgtttacgagcacagat

SEQ ID NO: 2428 - DNA, 80 bp, Artificial Sequence
  Description of Artificial Sequence: Synthetic oligonucleotide
  Description of Combined DNA/RNA Molecule: Synthetic oligonucleotide
ttttgttuacgagcacagatacgauaacggtacaaggctaaagcuutgctaacggucgagctgagcacaacaaggaaugt

SEQ ID NO: 2429 - DNA, 20 bp, Artificial Sequence
  Description of Artificial Sequence: Synthetic primer
tattaatagacctgagagta

SEQ ID NO: 2430 - DNA, 20 bp, Artificial Sequence
  Description of Artificial Sequence: Synthetic primer
caacagcctcaagccagtgt

SEQ ID NO: 2431 - DNA, 247 bp, Artificial Sequence
  Description of Artificial Sequence: Synthetic polynucleotide
caacagcctcaagccagtgtcctgtatgaggatttgcttatgtctgaaggagaagatgatgaggaagatgctgggagtgatgaagaaggagacaatcctttctctggtaggcctcaaccattgcttctattcctttataactcactacagcaccctcagaactggactggataggcgctcttggccacatatgcttttattggaagctgcctcttttattgaattcctattaatagacctgagagta

SEQ ID NO: 2432 - DNA, 80 bp, Artificial Sequence
  Description of Artificial Sequence: Synthetic oligonucleotide
  Description of Combined DNA/RNA Molecule: Synthetic oligonucleotide
tattaauagacctgagagtaacgauaacggtacaaggctaaagcuutgctaacggucgagcaacagccucaagccagtgt

SEQ ID NO: 2433 - DNA, 20 bp, Artificial Sequence
  Description of Artificial Sequence: Synthetic primer
atgtgacagtgttttagcaa

SEQ ID NO: 2434 - DNA, 20 bp, Artificial Sequence
  Description of Artificial Sequence: Synthetic primer
ctgccccatctgtgggcttg

SEQ ID NO: 2435 - DNA, 248 bp, Artificial Sequence
  Description of Artificial Sequence: Synthetic polynucleotide
ctgccccatctgtgggcttgtgtcagtaatttctctttctggagtgattgcgggttgtctttttccttccggtagatgtttgactggatcacacacaacaaaggcctgtttctaaacagctacacagagattgggaccagccaccctcatgccatggagcttcagacgcagcacaatcactttgccatgaactgtatggtaagacactcggaacagctggaccctggcatgtgacagtgttttagcaa

SEQ ID NO: 2436 - DNA, 80 bp, Artificial Sequence
  Description of Artificial Sequence: Synthetic oligonucleotide
  Description of Combined DNA/RNA Molecule: Synthetic oligonucleotide
atgtgacagugttttagcaaacgauaacggtacaaggctaaagcuutgctaacggucgagctgccccauctgtgggcttg

SEQ ID NO: 2437 - DNA, 20 bp, Artificial Sequence
  Description of Artificial Sequence: Synthetic primer
aaaaattaagttttctagtc

SEQ ID NO: 2438 - DNA, 20 bp, Artificial Sequence
  Description of Artificial Sequence: Synthetic primer
cagggtgactcactggaaga

SEQ ID NO: 2439 - DNA, 248 bp, Artificial Sequence
  Description of Artificial Sequence: Synthetic polynucleotide
cagggtgactcactggaagagatttataacaaaatcaaacaaatcattgaggaccagtctgggcactacatttgggtcccatcccctgaaaaactctgaagaatcccctccaaccattctcttgtgaacagaagaaatcaagtccctcttccctcctccctcttcattcctgtccccatggggagaacaaatgctactgttcttgtccccttttttagatatgtcaaaaaaaattaagttttctagtc

SEQ ID NO: 2440 - DNA, 80 bp, Artificial Sequence
  Description of Artificial Sequence: Synthetic oligonucleotide
  Description of Combined DNA/RNA Molecule: Synthetic oligonucleotide
aaaaattaagutttctagtcacgauaacggtacaaggctaaagcuutgctaacggucgagcagggtgacucactggaaga

SEQ ID NO: 2441 - DNA, 20 bp, Artificial Sequence
  Description of Artificial Sequence: Synthetic primer
cattaatttgtttgctgagg

SEQ ID NO: 2442 - DNA, 20 bp, Artificial Sequence
  Description of Artificial Sequence: Synthetic primer
catatggagtccaaagtcaa

SEQ ID NO: 2443 - DNA, 248 bp, Artificial Sequence
  Description of Artificial Sequence: Synthetic polynucleotide
catatggagtccaaagtcaatatttcctcaccgaagcaagtgctttccccagagcatctccagtctgggagctgccggctgccccgcttcctctatttgctgcaaaaacaaaaggcagaatatgaaaaccaggcagtgagacgtctaacaattttctattcctggtccatttactcacaatttaattgcatttttaatgctaattacaacacattaatctttaattagcattaatttgtttgctgagg

SEQ ID NO: 2444 - DNA, 80 bp, Artificial Sequence
  Description of Artificial Sequence: Synthetic oligonucleotide
  Description of Combined DNA/RNA Molecule: Synthetic oligonucleotide
cattaattugtttgctgaggacgauaacggtacaaggctaaagcuutgctaacggucgagcatatggaguccaaagtcaa

SEQ ID NO: 2445 - DNA, 20 bp, Artificial Sequence
  Description of Artificial Sequence: Synthetic primer
agataaggaggagtctggct

SEQ ID NO: 2446 - DNA, 20 bp, Artificial Sequence
  Description of Artificial Sequence: Synthetic primer
cctggcttaccttcattgga

SEQ ID NO: 2447 - DNA, 248 bp, Artificial Sequence
  Description of Artificial Sequence: Synthetic polynucleotide
agccagactcctccttatctccagtgtcaaacttgacatcagcctgcgagcggagcatggtaacttctccagcaatcagagcgctccccctcacatcagtggcatgcttcatggagatatgctcctctcactgccctctgcaccagcaacatggattgtcagctctccatcctcctccttctcagctgctctgttctcgacagcttcggggaactgattccgcagccttccaatgaaggtaagccagg

SEQ ID NO: 2448 - DNA, 80 bp, Artificial Sequence
  Description of Artificial Sequence: Synthetic oligonucleotide
  Description of Combined DNA/RNA Molecule: Synthetic oligonucleotide
agataaggaggaguctggctacgauaacggtacaaggctaaagcuutgctaacggucgagcctggctuaccttcattgga

SEQ ID NO: 2449 - DNA, 20 bp, Artificial Sequence
  Description of Artificial Sequence: Synthetic primer
atagcactgactcgaattcc

SEQ ID NO: 2450 - DNA, 20 bp, Artificial Sequence
  Description of Artificial Sequence: Synthetic primer
ctggaccttctgttttttgt

SEQ ID NO: 2451 - DNA, 248 bp, Artificial Sequence
  Description of Artificial Sequence: Synthetic polynucleotide
ggaattcgagtcagtgctatgctctactcctctgctgtttgggagtagattacttttgtgttagcttatttaatagtctttttatatgtcttgatttaccaagttgatagagtttattttttatctctttgctatttcctacttgtatagtcagaagacacaacatctctaagttacacagcaacaggcctcaaaccaaacacaatgtatgaattctcggtcatggtaacaaaaaacagaaggtccag

SEQ ID NO: 2452 - DNA, 80 bp, Artificial Sequence
  Description of Artificial Sequence: Synthetic oligonucleotide
  Description of Combined DNA/RNA Molecule: Synthetic oligonucleotide
atagcacugactcgaattccacgauaacggtacaaggctaaagcuutgctaacggucgagctggacctuctgttttttgt

SEQ ID NO: 2453 - DNA, 20 bp, Artificial Sequence
  Description of Artificial Sequence: Synthetic primer
ttaacttactaaacaaaaag

SEQ ID NO: 2454 - DNA, 20 bp, Artificial Sequence
  Description of Artificial Sequence: Synthetic primer
cctcactgatataaatccca

SEQ ID NO: 2455 - DNA, 249 bp, Artificial Sequence
  Description of Artificial Sequence: Synthetic polynucleotide
cctcactgatataaatcccaatgtcgtcttcatcgtccgtccggtagcacacagtgaggcccagcttgtcctggctgttcattctgtagaggtccacttcctagacaaagaaaggcattcccagtgagactccagcaggcaatgcgagttgaggggatgtcaaatgctttaaaaatattatcttcaaatgaggaactggatttctttgcattcaactgtgtagggccggttaacttactaaacaaaaag

SEQ ID NO: 2456 - DNA, 80 bp, Artificial Sequence
  Description of Artificial Sequence: Synthetic oligonucleotide
  Description of Combined DNA/RNA Molecule: Synthetic oligonucleotide
ttaacttacuaaacaaaaagacgauaacggtacaaggctaaagcuutgctaacggucgagcctcactgauataaatccca

SEQ ID NO: 2457 - DNA, 20 bp, Artificial Sequence
  Description of Artificial Sequence: Synthetic primer
ttgaaaagcctcagctttcc

SEQ ID NO: 2458 - DNA, 20 bp, Artificial Sequence
  Description of Artificial Sequence: Synthetic primer
cctttgctcgaccatagccc

SEQ ID NO: 2459 - DNA, 249 bp, Artificial Sequence
  Description of Artificial Sequence: Synthetic polynucleotide
ggaaagctgaggcttttcaaatcagttaggctagaatgggaagcaaatcccattgaaagatataaaactatgagggagaaaagaatgacagtaaacaaatctgagctaatgttatactgttgtgtatgtctttcttttaaaatttgatagatattttgctagatgatgctggtgatgcaactggacataaagatggccgcagtgtgaaaattatagtctccataagcaagggctatggtcgagcaaagg

SEQ ID NO: 2460 - DNA, 80 bp, Artificial Sequence
  Description of Artificial Sequence: Synthetic oligonucleotide
  Description of Combined DNA/RNA Molecule: Synthetic oligonucleotide
ttgaaaagccucagctttccacgauaacggtacaaggctaaagcuutgctaacggucgagcctttgcucgaccatagccc

SEQ ID NO: 2461 - DNA, 20 bp, Artificial Sequence
  Description of Artificial Sequence: Synthetic primer
cctggttatgatggctggtg

SEQ ID NO: 2462 - DNA, 20 bp, Artificial Sequence
  Description of Artificial Sequence: Synthetic primer
cgtcatcaagtgcgacatgt

SEQ ID NO: 2463 - DNA, 249 bp, Artificial Sequence
  Description of Artificial Sequence: Synthetic polynucleotide
cgtcatcaagtgcgacatgtctgcgctgcagcgagtgctctaccgccacatgcaggccaagggcgtgctgctgactgatggctccgagaaggacaagaaggtgggccccagagtcccccaactgcattccccactgggtgtccaaggccggcagcgtggcaggcagagcagagcgtgctctgaccatcgggtcatgatctggtcatgatccccagggcatctggccagccctggttatgatggctggtg

SEQ ID NO: 2464 - DNA, 80 bp, Artificial Sequence
  Description of Artificial Sequence: Synthetic oligonucleotide
  Description of Combined DNA/RNA Molecule: Synthetic oligonucleotide
cctggttaugatggctggtgacgauaacggtacaaggctaaagcuutgctaacggucgagcgtcatcaagugcgacatgt

SEQ ID NO: 2465 - DNA, 20 bp, Artificial Sequence
  Description of Artificial Sequence: Synthetic primer
ttttctcttagaaacttaca

SEQ ID NO: 2466 - DNA, 20 bp, Artificial Sequence
  Description of Artificial Sequence: Synthetic primer
cagtttccttaccctgccag

SEQ ID NO: 2467 - DNA, 249 bp, Artificial Sequence
  Description of Artificial Sequence: Synthetic polynucleotide
tgtaagtttctaagagaaaaaaaaattgtaatttaaaaaaattaaaaaggagaaaaattgaaagaaaaaaatgtgctgtcatctgttaagccaaattctctatcaaaaattaaacatcaaatagaccacataatgaaaagagacactgaccttaaaaattgttgtaggttcttcattaagattgactcgtgttattactcttccagaatcttcttccacttcaaaaatactggcagggtaaggaaactg

SEQ ID NO: 2468 - DNA, 80 bp, Artificial Sequence
  Description of Artificial Sequence: Synthetic oligonucleotide
  Description of Combined DNA/RNA Molecule: Synthetic oligonucleotide
ttttctctuagaaacttacaacgauaacggtacaaggctaaagcuutgctaacggucgagcagtttcctuaccctgccag

SEQ ID NO: 2469 - DNA, 20 bp, Artificial Sequence
  Description of Artificial Sequence: Synthetic primer
gagaactaaataggtctttg

SEQ ID NO: 2470 - DNA, 20 bp, Artificial Sequence
  Description of Artificial Sequence: Synthetic primer
ctcgtgttaattgtgtatga

SEQ ID NO: 2471 - DNA, 249 bp, Artificial Sequence
  Description of Artificial Sequence: Synthetic polynucleotide
caaagacctatttagttctcatgcaattgcatcaaagcaacaaatacttacactctgaactacattgacaaaacttttcacaaaaattttgtgctatcacacaagggcacgaactgtcacaaggctgccgtggatgatcacagggttgatagttgtaaacatggttagaggagccgtctgagtaaagataacatcatgcaggccaatgaatccagggagatggaaacgatcatacacaattaacacgag

SEQ ID NO: 2472 - DNA, 80 bp, Artificial Sequence
  Description of Artificial Sequence: Synthetic oligonucleotide
  Description of Combined DNA/RNA Molecule: Synthetic oligonucleotide
gagaactaaauaggtctttgacgauaacggtacaaggctaaagcuutgctaacggucgagctcgtgttaautgtgtatga

SEQ ID NO: 2473 - DNA, 20 bp, Artificial Sequence
  Description of Artificial Sequence: Synthetic primer
ctgcacccatatctccatag

SEQ ID NO: 2474 - DNA, 20 bp, Artificial Sequence
  Description of Artificial Sequence: Synthetic primer
cttcatcttcctgctcagca

SEQ ID NO: 2475 - DNA, 249 bp, Artificial Sequence
  Description of Artificial Sequence: Synthetic polynucleotide
cttcatcttcctgctcagcacccgggctggggggctcggcctgaacctccagtcggcagacactgtgatcatttttgacagcgactggaatcctcaccaggtaaaagcgggccgggccccaggtcgaggagaaggaagggggtgcctgcaaaacctcgaggagacggccctggcttgagggtcctccagcctcctccacattgtcttggaccccaggagccgggaggagctgcacccatatctccatag

SEQ ID NO: 2476 - DNA, 80 bp, Artificial Sequence
  Description of Artificial Sequence: Synthetic oligonucleotide
  Description of Combined DNA/RNA Molecule: Synthetic oligonucleotide
ctgcacccauatctccatagacgauaacggtacaaggctaaagcuutgctaacggucgagcttcatctucctgctcagca

SEQ ID NO: 2477 - DNA, 20 bp, Artificial Sequence
  Description of Artificial Sequence: Synthetic primer
ttggttctctaaattatagc

SEQ ID NO: 2478 - DNA, 20 bp, Artificial Sequence
  Description of Artificial Sequence: Synthetic primer
ctcgtcggcatccaccacgt

SEQ ID NO: 2479 - DNA, 249 bp, Artificial Sequence
  Description of Artificial Sequence: Synthetic polynucleotide
gctataatttagagaaccaagggggatttcattataacaaaattggcaaacacacaggcacctgctggcaatagacccctgctcctatagccaagaagtggaatagcatctctacgggccattctaatagcctcaaaatctctgcaccagggggatgaaagaatgcatttgccaagtcctacagactccaacttctaccgtgccctgatggatgaagaagacatggacgacgtggtggatgccgacgag

SEQ ID NO: 2480 - DNA, 80 bp, Artificial Sequence
  Description of Artificial Sequence: Synthetic oligonucleotide
  Description of Combined DNA/RNA Molecule: Synthetic oligonucleotide
ttggttctcuaaattatagcacgauaacggtacaaggctaaagcuutgctaacggucgagctcgtcggcauccaccacgt

SEQ ID NO: 2481 - DNA, 20 bp, Artificial Sequence
  Description of Artificial Sequence: Synthetic primer
cacacgggggtaagggtttg

SEQ ID NO: 2482 - DNA, 20 bp, Artificial Sequence
  Description of Artificial Sequence: Synthetic primer
catggtgggactgagccgca

SEQ ID NO: 2483 - DNA, 249 bp, Artificial Sequence
  Description of Artificial Sequence: Synthetic polynucleotide
caaacccttacccccgtgtgtattcccaacccaaagcacatttattgagggcactggggagccatgggtggttgtagagcaggagcagggacaggtgcaagcaagcctggagggtggatggaagcagcagctgatgggctggtcccccagatcgtgctgcctgccctctttgtgggcctggccctcgtgttcagcctcatcgtgcctcctttcgggcactacccggctctgcggctcagtcccaccatg

SEQ ID NO: 2484 - DNA, 80 bp, Artificial Sequence
  Description of Artificial Sequence: Synthetic oligonucleotide
  Description of Combined DNA/RNA Molecule: Synthetic oligonucleotide
cacacggggguaagggtttgacgauaacggtacaaggctaaagcuutgctaacggucgagcatggtgggacugagccgca

SEQ ID NO: 2485 - DNA, 20 bp, Artificial Sequence
  Description of Artificial Sequence: Synthetic primer
gtagcaccagactctggggt

SEQ ID NO: 2486 - DNA, 20 bp, Artificial Sequence
  Description of Artificial Sequence: Synthetic primer
cctggatgaccacaaagcgc

SEQ ID NO: 2487 - DNA, 249 bp, Artificial Sequence
  Description of Artificial Sequence: Synthetic polynucleotide
accccagagtctggtgctacttctctaccacctgagggctttgggctgtcccttgggactgtctagaccagactggagggggagtgggaggggagaggcagcaagcacacagggcctgggactagcatgctgacctccctcctgccccaggttggatgattgactctgaatgtcggccaagattccgggagttggtgtctgaattctcccgcatggccagggacccccagcgctttgtggtcatccagg

SEQ ID NO: 2488 - DNA, 80 bp, Artificial Sequence
  Description of Artificial Sequence: Synthetic oligonucleotide
  Description of Combined DNA/RNA Molecule: Synthetic oligonucleotide
gtagcaccagacuctggggtacgauaacggtacaaggctaaagcuutgctaacggucgagcctggaugaccacaaagcgc

SEQ ID NO: 2489 - DNA, 20 bp, Artificial Sequence
  Description of Artificial Sequence: Synthetic primer
aaaattcaaacaataatgca

SEQ ID NO: 2490 - DNA, 20 bp, Artificial Sequence
  Description of Artificial Sequence: Synthetic primer
caagtaaaaggtatacataa

SEQ ID NO: 2491 - DNA, 250 bp, Artificial Sequence
  Description of Artificial Sequence: Synthetic polynucleotide
tgcattattgtttgaatttttatactgatttcaaatgaataaatcctttaggtaactcgccttcttttgaaatttggtgctgatgtaaatgtaagtggtgaagttggagatagacccctccacctagcatctgcaaaaggattcttgaatattgcaaaactcttgatggaagaaggcagcaaagcagatggtaagattatatatttaaaagacctttgctatcatttgctttatgtataccttttacttg

SEQ ID NO: 2492 - DNA, 80 bp, Artificial Sequence
  Description of Artificial Sequence: Synthetic oligonucleotide
  Description of Combined DNA/RNA Molecule: Synthetic oligonucleotide
aaaatucaaacaataatgcaacgauaacggtacaaggctaaagcuutgctaacggucgagcaagtaaaagguatacataa

SEQ ID NO: 2493 - DNA, 20 bp, Artificial Sequence
  Description of Artificial Sequence: Synthetic primer
ctaaatcaaaattttttagt

SEQ ID NO: 2494 - DNA, 20 bp, Artificial Sequence
  Description of Artificial Sequence: Synthetic primer
ccagctaggaacaaagaaaa

SEQ ID NO: 2495 - DNA, 250 bp, Artificial Sequence
  Description of Artificial Sequence: Synthetic polynucleotide
actaaaaaattttgatttagccctttggggcccatttattctctagggcaaacaaatgatgtctatggtcctcttctttgaggggccaattagattaggacatagcaaagcttactcaatgtctacttttttttttttttttttttacagtcacaatattcttctctatgaggatgggcatgctgtggtggcagattttggaggtgagataccccaaaatggcatcctttttttctttgttcctagctgg

SEQ ID NO: 2496 - DNA, 80 bp, Artificial Sequence
  Description of Artificial Sequence: Synthetic oligonucleotide
  Description of Combined DNA/RNA Molecule: Synthetic oligonucleotide
ctaaatcaaaautttttagtacgauaacggtacaaggctaaagcuutgctaacggucgagccagcuaggaacaaagaaaa

SEQ ID NO: 2497 - DNA, 20 bp, Artificial Sequence
  Description of Artificial Sequence: Synthetic primer
agcagggtaaatagcctgcg

SEQ ID NO: 2498 - DNA, 20 bp, Artificial Sequence
  Description of Artificial Sequence: Synthetic primer
catgaaaaagaagaattcaa

SEQ ID NO: 2499 - DNA, 250 bp, Artificial Sequence
  Description of Artificial Sequence: Synthetic polynucleotide
catgaaaaagaagaattcaaggctttgaaaacgttaagtattttctaccaagctgggacttccaaagctgggaatcctattttttattatgttgcacggaggtaagaaatactatgttttgggtctcttaacagaattttttaaattatagcaaatatagagagatggcaagtttggtttttcccagttgacttaacaggaattgaagacaagtttacttgggagcatatagcagggtaaatagcctgcg

SEQ ID NO: 2500 - DNA, 80 bp, Artificial Sequence
  Description of Artificial Sequence: Synthetic oligonucleotide
  Description of Combined DNA/RNA Molecule: Synthetic oligonucleotide
agcaggguaaatagcctgcgacgauaacggtacaaggctaaagcuutgctaacggucgagcatgaaaaagaagaautcaa

SEQ ID NO: 2501 - DNA, 20 bp, Artificial Sequence
  Description of Artificial Sequence: Synthetic primer
gtgagacagggatatttaca

SEQ ID NO: 2502 - DNA, 20 bp, Artificial Sequence
  Description of Artificial Sequence: Synthetic primer
cgtgggcttggtggcaatct

SEQ ID NO: 2503 - DNA, 250 bp, Artificial Sequence
  Description of Artificial Sequence: Synthetic polynucleotide
tgtaaatatccctgtctcactgtcctttttcacctctttgggtgccatcctcagggttagcccaggtccctcctctgcaggggtggggtggtgtcttttcctgctacctgccctcttctgtgaagctgacatctcatcctttccttgcagggccaaagaggcagatcagctgaagcaggacctgcaggaagcacgcgaggcggagcgaagagccaagcagaagctcctggagattgccaccaagcccacg

SEQ ID NO: 2504 - DNA, 80 bp, Artificial Sequence
  Description of Artificial Sequence: Synthetic oligonucleotide
  Description of Combined DNA/RNA Molecule: Synthetic oligonucleotide
gtgagacagggauatttacaacgauaacggtacaaggctaaagcuutgctaacggucgagcgtgggctuggtggcaatct

SEQ ID NO: 2505 - DNA, 20 bp, Artificial Sequence
  Description of Artificial Sequence: Synthetic primer
tagggggcttggtggtgggg

SEQ ID NO: 2506 - DNA, 20 bp, Artificial Sequence
  Description of Artificial Sequence: Synthetic primer
cctccacgccctgtcgccca

SEQ ID NO: 2507 - DNA, 250 bp, Artificial Sequence
  Description of Artificial Sequence: Synthetic polynucleotide
cctccacgccctgtcgcccacgcggcgccaacctgcccctgctgacccaagcaggtgtccctggagtccaacgcgtccatgagctccaacacaccactggtgcgcatcgcaaggctgtcctcaggggagggccccacgctggccaatgtctccgagctcgagctgcctgccgaccccaaatgggagctgtctcgggcccggtcagtggtgctgagggccagcgttggctgtagggggcttggtggtgggg

SEQ ID NO: 2508 - DNA, 80 bp, Artificial Sequence
  Description of Artificial Sequence: Synthetic oligonucleotide
  Description of Combined DNA/RNA Molecule: Synthetic oligonucleotide
tagggggctuggtggtggggacgauaacggtacaaggctaaagcuutgctaacggucgagcctccacgcccugtcgccca

SEQ ID NO: 2509 - DNA, 20 bp, Artificial Sequence
  Description of Artificial Sequence: Synthetic primer
ctaaggcgtgactagacaag

SEQ ID NO: 2510 - DNA, 20 bp, Artificial Sequence
  Description of Artificial Sequence: Synthetic primer
ccggacagcttccagaacct

SEQ ID NO: 2511 - DNA, 250 bp, Artificial Sequence
  Description of Artificial Sequence: Synthetic polynucleotide
cttgtctagtcacgccttagaggcacggccctgagatcccgatgacacattcataacaggtgacaggtccgacatgtttacttcttactagcccaaagaggtcttcaaagcaaatcgcatcataacagtcacccgctcctgcctctttagggctgaccagggtcgcctcctggactgcgtggtgcgatggggaagcctcactgaagggaagatcagggcgcacctgggggaggttctggaagctgtccgg

SEQ ID NO: 2512 - DNA, 80 bp, Artificial Sequence
  Description of Artificial Sequence: Synthetic oligonucleotide
  Description of Combined DNA/RNA Molecule: Synthetic oligonucleotide
ctaaggcgugactagacaagacgauaacggtacaaggctaaagcuutgctaacggucgagccggacagcutccagaacct
